(19) United States
(12) Patent Application Publication
(10) Pub. No.: US 2014/0079705 A1
(43) Pub. Date: Mar. 20, 2014

(54) BISPECIFIC IMMUNOBINDERS DIRECTED AGAINST TNF AND IL-17

(71) Applicant: Abbvie Inc., North Chicago, IL (US)

(72) Inventors: Chung-ming Hsieh, Newton, MA (US); Jennifer Perez, Worcester, MA (US); Lorenzo Benatuil, Northborough, MA (US); Yuliya Kutskova, Northborough, MA (US); John Memmott, Framingham, MA (US); Suju Zhong, Shrewsbury, MA (US); Lucia Eaton, Grafton, MA (US); Margaret Hugunin, North Grafton, MA (US); Alyssa Brito, Hudson, MA (US); Anca Clabbers, Rutland, MA (US)

(21) Appl. No.: 14/082,502

(22) Filed: Nov. 18, 2013

Related U.S. Application Data
(62) Division of application No. 13/659,666, filed on Oct. 24, 2012.
(60) Provisional application No. 61/550,619, filed on Oct. 24, 2011.

(51) Int. Cl. C07K 16/24; C07K 16/46

(52) U.S. Cl. CPC C07K 16/241; C07K 16/468
USPC 424/136.1; 530/387.3; 536/23.53; 435/320.1; 435/69.6; 424/133.1; 435/252.33; 435/328; 435/254.21

(57) ABSTRACT

Engineered multivalent and multispecific binding proteins, methods of making, and specifically to their uses in the prevention, diagnosis, and/or treatment of disease are provided.

### CROSS-REFERENCE TO RELATED APPLICATIONS

[0001] This application claims priority to U.S. Provisional Application Ser. No. 61/550,619, filed Oct. 24, 2011, which is incorporated herein by reference in its entirety.

### BACKGROUND OF THE INVENTION

[0002] 1. Field of the Invention

[0003] Multivalent and multispecific binding proteins that bind TNF and IL-17, methods of making, and specifically to their uses in the, diagnosis, prevention and/or treatment of acute and chronic inflammatory diseases, cancer, and other diseases are provided.

[0004] 2. Background of the Invention

[0005] Engineered proteins, such as multispecific binding proteins capable of binding two or more antigens are known in the art. Such multispecific binding proteins can be generated using cell fusion, chemical conjugation, or recombinant DNA techniques.

[0006] Bispecific binding protein have been produced using quadroma technology (see Milstein and Cuello (1983) Nature 305(5934):537-40) based on the somatic fusion of two different hybridoma cell lines expressing murine monoclonal antibodies (mAbs) with the desired specificities of the bispecific antibody. Because of the random pairing of two different immunoglobulin (Ig) heavy and light chains within the resulting hybrid-hybridoma (or quadroma) cell line, up to ten different Ig species are generated, of which only one is a functional bispecific antibody. The presence of mis-paired by-products, and significantly reduced production yields, means sophisticated purification procedures are required.

[0007] Bispecific binding protein can also be produced by chemical conjugation of two different mAbs (see Staerz et al. (1985) Nature 314(6012): 628-31). This approach does not yield homogeneous preparation. Other approaches have used chemical conjugation of two different mAbs or smaller antibody fragments (see Brennan et al. (1985) Science 229(4708): 81-3).

[0008] Another method used to produce bispecific binding protein is the coupling of two parental antibodies with a hetero-bifunctional crosslinker, but the resulting bispecific antibodies suffer from significant molecular heterogeneity because reaction of the crosslinker with the parental antibodies is not site-directed. To obtain more homogeneous preparations of bispecific antibodies two different Fab fragments have been chemically crosslinked at their hinge cysteine residues in a site-directed manner (see Glennie et al. (1987) J. Immunol. 139(7): 2367-75). But this method results in Fab′2 fragments, not full a IgG molecule.

[0009] A wide variety of other recombinant bispecific antibody formats have been developed (see Kriangkum et al. (2001) Biomol. Engin. 18(2): 31-40). Tandem single-chain Fv molecules and diabodies, and various derivatives thereof, are the most widely used. Routinely, construction of these molecules starts from two single-chain Fv (scFv) fragments that recognize different antigens (see Economides et al. (2003) Nat. Med. 9(1): 47-52). Tandem scFv molecules (taFv) represent a straightforward format by simply connecting the two scFv molecules with an additional peptide linker. The two scFv fragments present in these tandem scFv molecules form separate folding entities. Various linkers can be used to connect the two scFv fragments and linkers with a length of up to 63 residues (see Nakanishi et al. (2001) Ann. Rev. Immunol. 19: 423-74). Although the parental scFv fragments can normally be expressed in soluble form in bacteria, it is, however, often observed that tandem scFv molecules form insoluble aggregates in bacteria. Thus, refolding protocols or the use of mammalian expression systems are routinely applied to produce soluble tandem scFv molecules. In vivo expression by transgenic rabbits and cattle of a tandem scFv directed against CD28 and a melanoma-associated proteoglycan was reported by Gracie et al. (1999) J. Clin. Invest. 104(10): 1393-401. In this construct, the two scFv molecules were connected by a CH1 linker and serum concentrations of up to 100 mg/L of the bispecific antibody were obtained. Various strategies including variations of the domain order or using middle linkers with varying length or flexibility were employed to allow soluble expression in bacteria. A few studies have reported expression of soluble tandem scFv molecules in bacteria (see Leung et al. (2000) J. Immunol. 164(12): 6495-502; Ito et al. (2003) J. Immunol. 170(9): 4802-9; Kann et al. (2002) J. Neuroimmunol. 125(1-2): 134-40) using either a very short Ala3 linker or long glycine/serine-rich linkers. In another study, phage display of a tandem scFv repertoire containing randomized middle linkers with a length of 3 or 6 residues was employed to enrich for those molecules that are produced in soluble and active form in bacteria. This approach resulted in the isolation of a tandem scFv molecule with a 6 amino acid residue linker (see Arndt and Krauss (2003) Methods Mol. Biol. 207: 305-21). It is unclear whether this linker sequence represents a general solution to the soluble expression of tandem scFv molecules. Nevertheless, this study demonstrated that phage display of tandem scFv molecules in combination with directed mutagenesis is a powerful tool to enrich for these molecules, which can be expressed in bacteria in an active form.

[0010] Bispecific diabodies (Db) utilize the diabody format for expression. Diabodies are produced from scFv fragments by reducing the length of the linker connecting the VH and VL domain to approximately 5 residues (see Peipp and Valerius (2002) Biochem. Soc. Trans. 30(4): 507-11). This reduction of linker size facilitates dimerization of two polypeptide chains by crossover pairing of the VH and VL domains. Bispecific diabodies are produced by expressing two polypeptide chains with either the structure VHA-VLB and VHB-VLA (VH-VL configuration), or VLA-VHB and VLB-VHA (VL-VH configuration) within the same cell. A large variety of different bispecific diabodies have been produced in the past and most of them can be expressed in soluble form in bacteria. However, a comparative study demonstrated that the orientation of the variable domains can influence expression and formation of active binding sites (see Mack et al. (1995) Proc. Natl. Acad. Sci. USA 92(15): 7021-5). Nevertheless, soluble expression in bacteria represents an important advantage over tandem scFv molecules. However, since two different polypeptide chains are expressed within a single cell inactive homodimers can be produced together with active heterodimers. This necessitates the implementation of additional purification steps in order to obtain homogenous preparations of bispecific diabodies. One approach to force the generation of bispecific diabodies is the production of knob-into-hole diabodies (see Holliger et al. (1993) Proc. Natl. Acad. Sci. USA 90(14): 6444-8.18). This approach was demonstrated for a bispecific diabody directed against HER2 and CD3. A large knob was introduced in the VH domain by exchanging Val37 with Phe and Leu45 with Trp and a complementary hole was produced in the VL domain by mutating Phe98 to Met and Tyr87 to Ala, either in the anti-HER2 or the anti-CD3 variable domains. By using this approach the production of bispecific diabodies could be increased from 72% by the parental diabody to over 90% by the knob-into-hole diabody. Importantly, production yields only slightly decreased as a result of these mutations. However, a reduction in antigen-binding activity was observed for several analyzed constructs. Thus, this rather elaborate approach requires the analysis of various constructs in order to identify those mutations that produce heterodimeric molecule with unaltered binding activity. In addition, such approach requires mutational modification of the immunoglobulin sequence at the constant region, thus creating non-native and non-natural form of the antibody sequence, which may result in increased immunogenicity, poor in vivo stability, as well as undesirable pharmacokinetics.

[0011] Single-chain diabodies (scDb) represent an alternative strategy for improving the formation of bispecific diabody-like molecules (see Holliger and Winter (1997) Cancer Immunol. Immunother. 45(3-4): 128-30; Wu et al. (1996) Immunotechnology 2(1): 21-36). Bispecific single-chain diabodies are produced by connecting the two diabody-forming polypeptide chains with an additional middle linker with a length of approximately 15 amino acid residues. Consequently, all molecules with a molecular weight corresponding to monomeric single-chain diabodies (50-60 kDa) are bispecific. Several studies have demonstrated that bispecific single chain diabodies are expressed in bacteria in soluble and active form with the majority of purified molecules present as monomers (see Holliger and Winter (1997) Cancer Immunol. Immunother. 45(3-4): 128-30; Wu et al. (1996) Immunotechnol. 2(1): 21-36; Pluckthun and Pack (1997) Immunotechnol. 3(2): 83-105; Ridgway et al. (1996) Protein Engin. 9(7): 617-21). Thus, single-chain diabodies combine the advantages of tandem scFvs (all monomers are bispecific) and diabodies (soluble expression in bacteria).

[0012] More recently diabodies have been fused to Fc to generate more Ig-like molecules, named di-diabodies (see Lu et al. (2004) J. Biol. Chem. 279(4): 2856-65). In addition, multivalent antibody construct comprising two Fab repeats in the heavy chain of an IgG and capable of binding four antigen molecules has been described (see PCT Publication No. WO 0177342 and Miller et al. (2003) J. Immunol. 170(9): 4854-61).

[0013] TNF (also referred to as tumor necrosis factor, tumor necrosis factor-alpha, tumor necrosis factor-α, TNF-α, and cachectin) is a cytokine involved in the regulation of immune responses. It plays a critical role in the pathology associated with a variety of diseases involving immune and inflammatory elements, such as autoimmune diseases, particularly those associated with inflammation. Therefore, the binding proteins herein may be used to treat these disorders. It is also involved in respiratory disorders; inflammatory and/or autoimmune conditions of various organs; tumors or cancers; and various types of viral, bacterial and parasitic infections.

[0014] Interleukin-17 (IL-17) is a cytokine secreted by activated T-cells, which acts as a potent mediator in immune responses by inducing immune signaling molecules in various tissues to recruit monocytes and neutrophils to the site of inflammation. It acts synergistically with TNF to carry out its functions. IL-17 has been linked to many immune/autoimmune related diseases including rheumatoid arthritis, asthma, lupus, allograft rejection and anti-tumor immunity.

[0015] There is a need in the art for improved multivalent binding proteins capable of binding TNF. U.S. Pat. No. 7,612,181 provides a novel family of binding proteins capable of binding two or more antigens with high affinity, which are called dual variable domain binding proteins (DVD-binding protein). Novel binding proteins that bind TNF are provided.

### BRIEF SUMMARY OF THE INVENTION

[0016] Multivalent binding proteins capable of binding TNF and IL17 are provided. A novel family of binding proteins capable of binding TNF and IL17 with high affinity are provided.

[0017] In one embodiment, binding proteins that bind TNF comprising a polypeptide chain, wherein the polypeptide chain comprises VD1-(X1)n-VD2-C-(X2)n, wherein VD1 is a first variable domain, VD2 is a second variable domain, C is a constant domain, X1 represents an amino acid or polypeptide, X2 represents an Fc region and n is 0 or 1, are provided. In an embodiment the VD1 and VD2 in the binding protein are heavy chain variable domains. In another embodiment, the heavy chain variable domain is a murine heavy chain variable domain, a human heavy chain variable domain, a CDR grafted heavy chain variable domain, or a humanized heavy chain variable domain. In yet another, embodiment VD1 and VD2 are capable of binding the same antigen. In another embodiment VD1 and VD2 are capable of binding different antigens. In still another embodiment, C is a heavy chain constant domain. In an embodiment, X1 is a linker with the proviso that X1 is not CH1. In an embodiment, X1 is a linker comprising the amino acid sequence AKTTPKLEEGEFSEAR (SEQ ID NO: 1); AKTTPKLEEGEFSEARV (SEQ ID NO: 2); AKTTPKLGG (SEQ ID NO: 3); SAKTTPKLGG (SEQ ID NO: 4); SAKTTP (SEQ ID NO: 5); RADAAP (SEQ ID NO: 6); RADAAPTVS (SEQ ID NO: 7); RADAAAAGGPGS (SEQ ID NO: 8); RADAAAA(G₄S)₄ (SEQ ID NO: 9), SAKTTPKLEEGEFSEARV (SEQ ID NO: 10); ADAAP (SEQ ID NO: 11); ADAAPTVSIFPP (SEQ ID NO: 12); TVAAP (SEQ ID NO: 13); TVAAPSVFIFPP (SEQ ID NO: 14); QPKAAP (SEQ ID NO: 15); QPKAAPSVTLFPP (SEQ ID NO: 16); AKTTPP (SEQ ID NO: 17); AKTTPPSVTPLAP (SEQ ID NO: 18); AKTTAP (SEQ ID NO: 19); AKTTAPSVYPLAP (SEQ ID NO: 20); ASTKGP (SEQ ID NO: 21); ASTKGPSVFPLAP (SEQ ID NO: 22), GGGGSGGGGSGGGGS (SEQ ID NO: 23); GENKVEYAPALMALS (SEQ ID NO: 24); GPAKELTPLKEAKVS (SEQ ID NO: 25); or GHEAAAVMQVQYPAS (SEQ ID NO: 26); TVAAPSVFIFPPTVAAPSVFIFPP (SEQ ID NO: 27); and ASTKGPSVFPLAPASTKGPSVFPLAP (SEQ ID NO: 28). In an embodiment, X2 is an Fc region. In another embodiment, X2 is a variant Fc region.

[0018] In an embodiment the binding protein disclosed herein comprises a polypeptide chain that binds TNF, wherein the polypeptide chain comprises VD1-(X1)n-VD2-C-(X2)n, wherein VD1 is a first heavy chain variable domain, VD2 is a second heavy chain variable domain, C is a heavy chain constant domain, X1 is a linker with the proviso that it is not CH1, and X2 is an Fc region.

[0019] In an embodiment, VD1 and VD2 in the binding protein are light chain variable domains. In an embodiment, the light chain variable domain is a murine light chain variable domain, a human light chain variable domain, a CDR grafted light chain variable domain, or a humanized light chain variable domain. In one embodiment VD1 and VD2 are capable of binding the same antigen. In another embodiment VD1 and VD2 are capable of binding different antigens. In an embodiment, C is a light chain constant domain. In an embodiment, X1 is a linker with the proviso that X1 is not CL. In an embodiment, X1 comprises the amino acid sequence AKTTPKLEEGEFSEAR (SEQ ID NO: 1); AKTTPKLEEGEFSEARV (SEQ ID NO: 2); AKTTPKLGG (SEQ ID NO: 3); SAKTTPKLGG (SEQ ID NO: 4); SAKTTP (SEQ ID NO: 5); RADAAP (SEQ ID NO: 6); RADAAPTVS (SEQ ID NO: 7); RADAAAAGGPGS (SEQ ID NO: 8); RADAAAA(G₄S)₄ (SEQ ID NO: 9), SAKTTPKLEEGEFSEARV (SEQ ID NO: 10); ADAAP (SEQ ID NO: 11); ADAAPTVSIFPP (SEQ ID NO: 12); TVAAP (SEQ ID NO: 13); TVAAPSVFIFPP (SEQ ID NO: 14); QPKAAP (SEQ ID NO: 15); QPKAAPSVTLFPP (SEQ ID NO: 16); AKTTPP (SEQ ID NO: 17); AKTTPPSVTPLAP (SEQ ID NO: 18); AKTTAP (SEQ ID NO: 19); AKTTAPSVYPLAP (SEQ ID NO: 20); ASTKGP (SEQ ID NO: 21); ASTKGPSVFPLAP (SEQ ID NO: 22), GGGGSGGGGSGGGGS (SEQ ID NO: 23); GENKVEYAPALMALS (SEQ ID NO: 24); GPAKELTPLKEAKVS (SEQ ID NO: 25); or GHEAAAVMQVQYPAS (SEQ ID NO: 26); TVAAPSVFIFPPTVAAPSVFIFPP (SEQ ID NO: 27); and ASTKGPSVFPLAPASTKGPSVFPLAP (SEQ ID NO: 28). In an embodiment, the binding protein does not comprise X2.

[0020] In an embodiment, both the variable heavy chains and variable light chains comprise the same linker. In another embodiment, the variable heavy chains and variable light chains comprise different linkers. In another embodiment, both the variable heavy chains and variable light chains comprise a short (about 6 amino acids) linker. In another embodiment, both the variable heavy chains and variable light chains comprise a long (greater than 6 amino acids) linker. In another embodiment, the variable heavy chain comprises a short linker and the variable light chain comprises a long linker. In another embodiment, the variable heavy chain comprises a long linker and the variable light chain comprises a short linker.

[0021] In an embodiment the binding protein disclosed herein comprises a polypeptide chain that bind TNF, wherein the polypeptide chain comprises VD1-(X1)n-VD2-C-(X2)n, wherein VD1 is a first light chain variable domain, VD2 is a second light chain variable domain, C is a light chain constant domain, X1 is a linker with the proviso that it is not CL, and X2 does not comprise an Fc region.

[0022] In another embodiment, a binding protein that binds TNF comprising two polypeptide chains, wherein the first polypeptide chain comprises VD1-(X1)n-VD2-C-(X2)n, wherein VD1 is a first heavy chain variable domain, VD2 is a second heavy chain variable domain, C is a heavy chain constant domain, X1 is a first linker, and X2 is an Fc region; and the second polypeptide chain comprises VD1-(X1)n-VD2-C-(X2)n, wherein VD1 is a first light chain variable domain, VD2 is a second light chain variable domain, C is a light chain constant domain, X1 is a second linker, and X2 does not comprise an Fc region is provided. In some embodiments, the first and second X1 are the same. In other embodiments, the first and second X1 are different. In some embodiments the first X1 is not a CH1 domain. In some embodiments the second X1 is not a CL domain.

[0023] In a particular embodiment, the Dual Variable Domain (DVD) binding protein comprises four polypeptide chains, wherein each of the first two polypeptide chains comprises VD1-(X1)n-VD2-C-(X2)n, wherein VD1 is a first heavy chain variable domain, VD2 is a second heavy chain variable domain, C is a heavy chain constant domain, X1 is a first linker, and X2 is an Fc region; and each of the second two polypeptide chain comprises VD1-(X1)n-VD2-C-(X2)n, wherein VD1 is a first light chain variable domain, VD2 is a second light chain variable domain, C is a light chain constant domain, X1 is a second linker, and X2 does not comprise an Fc region. Such a DVD-binding protein has four antigen binding sites. In some embodiments, the first and second X1 are the same. In other embodiments, the first and second X1 are different. In some embodiments the first X1 is not a CH1 domain. In some embodiments the second X1 is not a CL domain. In another embodiment the binding proteins disclosed herein are capable of binding TNF. Accordingly, in some embodiments, the binding proteins comprise at least two variable domain sequences (e.g., VD1 and VD2) capable of binding TNF, in any orientation. In some embodiments, VD1 and VD2 are independently chosen. Therefore, in some embodiments, VD1 and VD2 comprise the same SEQ ID NO and, in other embodiments, VD1 and VD2 comprise different SEQ ID NOS.

[0024] In an embodiment, the binding protein comprises VD1 and VD2 heavy chain variable domains, and VD1 and VD2 light chain variable domains, wherein

(a) the VD1 or VD2 heavy chain variable domain comprises three CDRs from SEQ ID NO: 541, 551, 561, 571, 581, 591, 601, 606, 611, 616, 621, 626, 631, 636, 643, 653, 661, 671, 681, 691, 701, 711, 721, 731, 741, 753, 763, 771, 776, 781, 786, 791, 796, 801, 805, 807, 809, or any one of 36-41, 48-72, or 88-97, the VD1 or VD2 light chain variable domain comprises three CDRs from SEQ ID NO: 546, 556, 566, 576, 586, 596, 648, 658, 666, 676, 686, 696, 706, 716, 726, 736, 746, 758, 768 or any one of 42-47, 73-87, or 98-107, and the binding protein is capable of binding TNF;
(b) the VD1 and VD2 heavy chain variable domains independently comprise three CDRs from SEQ ID NO: 541, 551, 561, 571, 581, 591, 601, 606, 611, 616, 621, 626, 631, 636, 643, 653, 661, 671, 681, 691, 701, 711, 721, 731, 741, 753, 763, 771, 776, 781, 786, 791, 796, 801, 805, 807, 809, or any one of 36-41, 48-72, or 88-97, the VD1 and VD2 light chain variable domains independently comprise three CDRs from SEQ ID NO: 546, 556, 566, 576, 586, 596, 648, 658, 666, 676, 686, 696, 706, 716, 726, 736, 746, 758, 768 or any one of 42-47, 73-87, or 98-107, and the binding protein is capable of binding TNF; or
(c) the VD1 heavy chain variable domain comprises three CDRs from SEQ ID NO: 541, 551, 561, 571, 581, 591, 601, 606, 611, 616, 621, 626, 631, 636, 643, 653, 661, 671, 681, 691, 701, 711, 721, 731, 741, 753, 763, 771, 776, 781, 786, 791, 796, 801, 805, 807, 809, or any one of 36-41, 48-72, or 88-97, and the VD2 heavy chain variable domain comprises three CDRs from SEQ ID NO: 30, 32, 34, 108, 109, 110, 111, 112, 113, 114 115, 121-317, 527-534, 543, 553, 563, 573, 583, 593, 603, 608, 613, 618, 623, 628, 633, 638, 641, 651, 663, 673, 683, 693, 703, 713, 723, 733, 743, 751, 761, 773, 778, 783, 788, 793, 798, 803 or 811; the VD1 light chain variable domain comprises three CDRs from SEQ ID NO: 546, 556, 566, 576, 586, 596, 648, 658, 666, 676, 686, 696, 706, 716, 726, 736, 746, 758, 768 or any one of 42-47, 73-87, or 98-107, and the VD2 light chain variable domain comprises three CDRs from SEQ ID NO: 31, 33, 35, 116, 117, 118, 119, 120, 318-526, 535-539, 548, 558, 568, 578, 588, 598, 646, 656, 668, 678, 688, 698, 708, 718, 728, 738, 748, 756, 766, or 812; or
(d) the VD2 heavy chain variable domain comprises three CDRs from SEQ ID NO: 541, 551, 561, 571, 581, 591, 601, 606, 611, 616, 621, 626, 631, 636, 643, 653, 661, 671, 681, 691, 701, 711, 721, 731, 741, 753, 763, 771, 776, 781, 786, 791, 796, 801, 805, 807, 809, or any one of 36-41, 48-72, or 88-97, and the VD1 heavy chain variable domain comprises three CDRs from SEQ ID NO: 30, 32, 34, 108, 109, 110, 111, 112, 113, 114, 115, 121-317, 527-534, 543, 553, 563, 573, 583, 593, 603, 608, 613, 618, 623, 628, 633, 638, 641, 651, 663, 673, 683, 693, 703, 713, 723, 733, 743, 751, 761, 773, 778, 783, 788, 793, 798, 803 or 811; the VD2 light chain variable domain comprises three CDRs from SEQ ID NO: 546, 556, 566, 576, 586, 596, 648, 658, 666, 676, 686, 696, 706, 716, 726, 736, 746, 758, 768 or any one of 42-47, 73-87, or 98-107, and the VD1 light chain variable domain comprises three CDRs from SEQ ID NO: 31, 33, 35, 116, 117, 118, 119, 120, 318-526, 535-539, 548, 558, 568, 578, 588, 598, 646, 656, 668, 678, 688, 698, 708, 718, 728, 738, 748, 756, 766, or 812.

[0025] In another embodiment, the binding protein comprises a heavy chain and a light chain sequence as shown in Table 1.

[0026] In another embodiment, a binding protein that binds TNF comprising a polypeptide chain, wherein the polypeptide chain comprises VD1-(X1)n-VD2-C-(X2)n, wherein; VD1 is a first heavy chain variable domain obtained from a first parent antibody or antigen binding portion thereof; VD2 is a second heavy chain variable domain obtained from a second parent antibody or antigen binding portion thereof, which can be the same as or different from the first parent antibody; C is a heavy chain constant domain; (X1)n is a linker with the proviso that it is not CH1, wherein the (X1)n is either present or absent; and (X2)n is an Fc region, wherein the (X2)n is either present or absent is provided. In an embodiment, the Fc region is absent from the binding protein.

[0027] In another embodiment, a binding protein that binds TNF comprising a polypeptide chain, wherein the polypeptide chain comprises VD1-(X1)n-VD2-C-(X2)n, wherein, VD1 is a first light chain variable domain obtained from a first parent antibody or antigen binding portion thereof; VD2 is a second light chain variable domain obtained from a second parent antibody or antigen binding portion thereof, which can be the same as or different from the first parent antibody; C is a light chain constant domain; (X1)n is a linker with the proviso that it is not CL, wherein the (X1)n is either present or absent; and (X2)n does not comprise an Fc region, wherein the (X2)n is either present or absent is provided. In an embodiment, (X2)n is absent from the binding protein.

[0028] In another embodiment, the binding protein that binds TNF comprises first and second polypeptide chains, wherein the first polypeptide chain comprises a first VD1-(X1)n-VD2-C-(X2)n, wherein VD1 is a first heavy chain variable domain obtained from a first parent antibody or antigen binding portion thereof; VD2 is a second heavy chain variable domain obtained from a second parent antibody or antigen binding portion thereof, which can be the same as or different from the first parent antibody; C is a heavy chain constant domain; (X1)n is a first linker, wherein the (X1)n is either present or absent; and (X2)n is an Fc region, wherein the (X2)n is either present or absent; and wherein the second polypeptide chain comprises a second VD1-(X1)n-VD2-C-(X2)n, wherein VD1 is a first light chain variable domain obtained from a first parent antibody or antigen binding portion thereof; VD2 is a second light chain variable domain obtained from a second parent antibody or antigen binding portion thereof, which can be the same as or different from the first parent antibody; C is a light chain constant domain; (X1)n is a second linker, wherein the (X1)n is either present or absent; and (X2)n does not comprise an Fc region, wherein the (X2)n is either present or absent. In another embodiment, the binding protein comprises two first polypeptide chains and two second polypeptide chains. In yet another embodiment, (X2)n is absent from the second polypeptide. In some embodiments, the first and second X1 are the same. In other embodiments, the first and second X1 are different. In some embodiments the first X1 is not a CH1 domain. In some embodiments the second X1 is not a CL domain. In still another embodiment, the Fc region, if present in the first polypeptide, is a native sequence Fc region or a variant sequence Fc region. In yet another embodiment, the Fc region is an Fc region from an IgG1, an Fc region from an IgG2, an Fc region from an IgG3, an Fc region from an IgG4, an Fc region from an IgA, an Fc region from an IgM, an Fc region from an IgE, or an Fc region from an IgD.

[0029] In another embodiment, the binding protein that binds TNF comprises four polypeptide chains, wherein, first and third polypeptide chains comprise VD1-(X1)n-VD2-C-(X2)n, wherein, VD1 is a first heavy chain variable domain obtained from a first parent antibody or antigen binding portion thereof; VD2 is a second heavy chain variable domain obtained from a second parent antibody or antigen binding portion thereof, which can be the same as or different from the first parent antibody; C is a heavy chain constant domain; (X1)n is a first linker, wherein the (X1)n is either present or absent; and (X2)n is an Fc region, wherein the (X2)n is either present or absent; and wherein second and fourth polypeptide chains comprise VD1-(X1)n-VD2-C-(X2)n, wherein VD1 is a first light chain variable domain obtained from a first parent antibody or antigen binding portion thereof; VD2 is a second light chain variable domain obtained from a second parent antibody or antigen binding portion thereof, which can be the same as or different from the first parent antibody; C is a light chain constant domain; (X1)n is a second linker, wherein the (X1)n is either present or absent; and (X2)n does not comprise an Fc region, wherein the (X2)n is either present or absent. In some embodiments, the first and second X1 are the same. In other embodiments, the first and second X1 are different. In some embodiments the first X1 is not a CH1 domain. In some embodiments the second X1 is not a CL domain.

[0030] A method of making a binding protein that binds TNF is provided. In an embodiment, the method of making a binding protein that binds IL-13 and IL-17 comprises the steps of a) obtaining a first parent antibody, or antigen binding portion thereof, that binds IL-13; b) obtaining a second parent antibody, or antigen binding portion thereof, that binds IL-17; c) constructing first and third polypeptide chains comprising VD1-(X1)n-VD2-C-(X2)n, wherein, VD1 is a first heavy chain variable domain of the first parent antibody, or antigen binding portion thereof; VD2 is a second heavy chain variable domain of the second parent antibody, or antigen binding portion thereof, which can be the same as or different from the first parent antibody; C is a heavy chain constant domain; (X1)n is a first linker, wherein the (X1)n is either present or absent; and (X2)n is an Fc region, wherein the (X2)n is either present or absent; d) constructing second and fourth polypeptide chains comprising VD1-(X1)n-VD2-C-(X2)n, wherein, VD1 is a first light chain variable domain of the first parent antibody, or antigen binding portion thereof; VD2 is a second light chain variable domain of the second parent antibody or antigen binding thereof; C is a light chain constant domain; (X1)n is a second linker, wherein the (X1)n is either present or absent; and (X2)n does not comprise an Fc region, wherein the (X2)n is either present or absent; e) expressing the first, second, third and fourth polypeptide chains; such that a binding protein that binds the first and the second antigen is generated. In some embodiments, the first and second X1 are the same. In other embodiments, the first and second X1 are different. In some embodiments the first X1 is not a CH1 domain. In some embodiments the second X1 is not a CL domain.

[0031] In still another embodiment, a method of generating a binding protein that binds TNF with desired properties comprising the steps of a) obtaining a first parent antibody or antigen binding portion thereof, that binds a TNF and possessing at least one desired property exhibited by the binding protein; b) obtaining a second parent antibody or antigen binding portion thereof, that binds a second antigen and possessing at least one desired property exhibited by the binding protein; c) constructing first and third polypeptide chains comprising VD1-(X1)n-VD2-C-(X2)n, wherein; VD1 is a first heavy chain variable domain obtained from the first parent antibody or antigen binding portion thereof; VD2 is a second heavy chain variable domain obtained from the second parent antibody or antigen binding portion thereof, which can be the same as or different from the first parent antibody; C is a heavy chain constant domain; (X1)n is a first linker, wherein the (X1)n is either present or absent; and (X2)n is an Fc region, wherein the (X2)n is either present or absent; d) constructing second and fourth polypeptide chains comprising VD1-(X1)n-VD2-C-(X2)n, wherein; VD1 is a first light chain variable domain obtained from the first parent antibody or antigen binding portion thereof; VD2 is a second light chain variable domain obtained from the second parent antibody or antigen binding portion thereof; C is a light chain constant domain; (X1)n is a second linker, wherein the (X1)n is either present or absent; and (X2)n does not comprise an Fc region, wherein the (X2)n is either present or absent; e) expressing the first, second, third and fourth polypeptide chains; such that a Dual Variable Domain Immunoglobulin capable of binding the first and the second antigen with desired properties is generated is provided. In some embodiments, the first and second X1 are the same. In other embodiments, the first and second X1 are different. In some embodiments the first X1 is not a CH1 domain. In some embodiments the second X1 is not a CL domain.

[0032] In one embodiment, the VD1 of the first and second polypeptide chains disclosed herein are obtained from the same parent antibody or antigen binding portion thereof. In another embodiment, the VD1 of the first and second polypeptide chains disclosed herein are obtained from different parent antibodies or antigen binding portions thereof. In another embodiment, the VD2 of the first and second polypeptide chains disclosed herein are obtained from the same parent antibody or antigen binding portion thereof. In another embodiment, the VD2 of the first and second polypeptide chains disclosed herein are obtained from different parent antibodies or antigen binding portions thereof.

[0033] In one embodiment the first parent antibody or antigen binding portion thereof, and the second parent antibody or antigen binding portion thereof, are the same antibody. In another embodiment the first parent antibody or antigen binding portion thereof, and the second parent antibody or antigen binding portion thereof, are different antibodies.

[0034] In one embodiment the first parent antibody or antigen binding portion thereof, binds a first antigen and the second parent antibody or antigen binding portion thereof, binds a second antigen. In a particular embodiment, the first and second antigens are the same antigen. In another embodiment, the parent antibodies bind different epitopes on the same antigen. In another embodiment the first and second antigens are different antigens. In another embodiment, the first parent antibody or antigen binding portion thereof, binds the first antigen with a potency different from the potency with which the second parent antibody or antigen binding portion thereof, binds the second antigen. In yet another embodiment, the first parent antibody or antigen binding portion thereof, binds the first antigen with an affinity different from the affinity with which the second parent antibody or antigen binding portion thereof, binds the second antigen.

[0035] In another embodiment the first parent antibody or antigen binding portion thereof, and the second parent antibody or antigen binding portion thereof, are a human antibody, CDR grafted antibody, or humanized antibody. In an embodiment, the antigen binding portions are a Fab fragment, a F(ab′)₂ fragment, a bivalent fragment comprising two Fab fragments linked by a disulfide bridge at the hinge region, a Fd fragment consisting of the VH and CH1 domains, a Fv fragment consisting of the VL and VH domains of a single arm of an antibody, a dAb fragment, an isolated complementarity determining region (CDR), a single chain antibody, or diabodies.

[0036] In another aspect, the invention provides an IL-17 binding protein comprising at least one heavy chain variable region (VH region) comprising:

[0037] (a) three complementarity determining regions (CDRs) from any one of SEQ ID NOS: 30, 32, 34, 108-115, 121-317, 527-534, 543, 553, 563, 573, 583, 593, 603, 608, 613, 618, 623, 628, 633, 638, 641, 651, 663, 673, 683, 693, 703, 713, 723, 733, 743, 751, 761, 773, 778, 783, 788, 793, 798, 803, and 811; or

[0038] (b) any one of SEQ ID NOS: 30, 32, 34, 108-115, 121-317, 527-534, 543, 553, 563, 573, 583, 593, 603, 608, 613, 618, 623, 628, 633, 638, 641, 651, 663, 673, 683, 693, 703, 713, 723, 733, 743, 751, 761, 773, 778, 783, 788, 793, 798, 803, and 811.

[0039] In one embodiment, the invention provides an IL-17 binding protein comprising at least one light chain variable regions (VL region) comprising:

[0040] (a) three complementarity determining regions (CDRs) from any one of SEQ ID NOS: 31, 33, 35, 116-120, 318-526, 535-539, 548, 558, 568, 578, 588, 598, 646, 656, 668, 678, 688, 698, 708, 718, 728, 738, 748, 756, 766, and 812; or

[0041] (b) any one of SEQ ID NOS: 31, 33, 35, 116-120, 318-526, 535-539, 548, 558, 568, 578, 588, 598, 646, 656, 668, 678, 688, 698, 708, 718, 728, 738, 748, 756, 766, and 812.

[0042] In one embodiment, the invention provides n IL-17 binding protein comprising at least one heavy chain variable region (VH region) and at least one light chain variable region (VL region), wherein the VH region comprises:

[0043] (a) three complementarity determining regions (CDRs) from any one of SEQ ID NOS: 30, 32, 34, 108-115, 121-317, 527-534, 543, 553, 563, 573, 583, 593, 603, 608, 613, 618, 623, 628, 633, 638, 641, 651, 663, 673, 683, 693, 703, 713, 723, 733, 743, 751, 761, 773, 778, 783, 788, 793, 798, 803, and 811; or

[0044] (b) any one of SEQ ID NOS: 30, 32, 34, 108-115, 121-317, 527-534, 543, 553, 563, 573, 583, 593, 603, 608, 613, 618, 623, 628, 633, 638, 641, 651, 663, 673, 683, 693, 703, 713, 723, 733, 743, 751, 761, 773, 778, 783, 788, 793, 798, 803, and 811; and

[0045] the VL region comprises:

[0046] (c) three CDRs from any one of SEQ ID NOS: 31, 33, 35, 116-120, 318-526, 535-539, 548, 558, 568, 578, 588, 598, 646, 656, 668, 678, 688, 698, 708, 718, 728, 738, 748, 756, 766, and 812; or

[0047] (d) any one of SEQ ID NOS: 31, 33, 35, 116-120, 318-526, 535-539, 548, 558, 568, 578, 588, 598, 646, 656, 668, 678, 688, 698, 708, 718, 728, 738, 748, 756, 766, and 812.

[0048] In one embodiment, the binding protein comprises two VH regions and two VL regions.

[0049] In one embodiment, the binding protein comprises at least one VH region and at least one VL region comprising a set of amino acid sequences selected from the group consisting of SEQ ID NOS: 30 and 31; 32 and 33; 34 and 35; 108 and 118; 108 and 119; 109 and 116; 110 and 117; 111 and 120; 112 and 117; 113 and 120; 114 and 117; 115 and 117; 527 and 537; 527 and 538; 528 and 535; 529 and 536; 530 and 539; 531 and 536; 532 and 539; 533 and 536; and 534 and 536.

[0050] In one embodiment, wherein the binding protein:

[0051] (a) modulates a biological function of IL-17;

[0052] (b) neutralizes IL-17;

[0053] (c) diminishes the ability of IL-17 to bind to its receptor;

[0054] (d) diminishes the ability of pro-human IL-17, mature-human IL-17, or truncated-human IL-17 to bind to its receptor; and/or

[0055] (e) reduces one or more of IL-17-dependent cytokine production, IL-17-dependent cell killing, IL-17-dependent inflammation, IL-17-dependent bone erosion, and IL-17-dependent cartilage damage.

[0056] In one embodiment, wherein the binding protein has an on rate constant (Kon) of at least about 10² M⁻¹s⁻¹; at least about 10³ M⁻¹s⁻¹; at least about 10⁴ M⁻¹s⁻¹; at least about 10⁵ M⁻¹s⁻¹; or at least about 10⁶ M⁻¹s⁻¹, as measured by surface plasmon resonance.

[0057] In one embodiment, the binding protein has an off rate constant (Koff) of at most about 10⁻³ s⁻¹; at most about 10⁻⁴ s⁻¹; at most about 10⁻⁵ s-1; or at most about 10⁻⁶ s⁻¹, as measured by surface plasmon resonance.

[0058] In one embodiment, the binding protein has a dissociation constant (KD) of at most about 10⁻⁷ M; at most about 10⁻⁸ M; at most about 10⁻⁹ M; at most about 10⁻¹⁰ M; at most about 10⁻¹¹ M; at most about 10⁻¹² M; or at most 10⁻¹³ M.

[0059] In another aspect, the invention provides a binding protein capable of binding human IL-17, the binding protein comprising:

[0060] (a) a heavy chain constant region;

[0061] (b) a light chain constant region;

[0062] (c) a heavy chain variable region (VH region) comprising an amino acid sequence selected from the group consisting of SEQ ID NO: 30, 32, 34, 108-115, 121-317, 527-534, 543, 553, 563, 573, 583, 593, 603, 608, 613, 618, 623, 628, 633, 638, 641, 651, 663, 673, 683, 693, 703, 713, 723, 733, 743, 751, 761, 773, 778, 783, 788, 793, 798, 803, and 811; and

[0063] (d) a light chain variable region (VL region) comprising an amino acid sequence selected from the group consisting of SEQ ID NO: 31, 33, 35, 116-120, 318-526, 535-539, 548, 558, 568, 578, 588, 598, 646, 656, 668, 678, 688, 698, 708, 718, 728, 738, 748, 756, 766, and 812.

[0064] In another embodiment the binding protein possesses at least one desired property exhibited by the first parent antibody or antigen binding portion thereof, or the second parent antibody or antigen binding portion thereof. Alternatively, the first parent antibody or antigen binding portion thereof and the second parent antibody or antigen binding portion thereof possess at least one desired property exhibited by the Dual Variable Domain Immunoglobulin. In an embodiment, the desired property is one or more antibody parameters. In another embodiment, the antibody parameters are antigen specificity, affinity to antigen, potency, biological function, epitope recognition, stability, solubility, production efficiency, immunogenicity, pharmacokinetics, bioavailability, tissue cross reactivity, or orthologous antigen binding. In an embodiment the binding protein is multivalent. In another embodiment, the binding protein is multispecific. The multivalent and or multispecific binding proteins described herein have desirable properties particularly from a therapeutic standpoint. For instance, the multivalent and or multispecific binding protein may (1) be internalized (and/or catabolized) faster than a bivalent antibody by a cell expressing an antigen to which the antibodies bind; (2) be an agonist antibody; and/or (3) induce cell death and/or apoptosis of a cell expressing an antigen which the multivalent antibody is capable of binding to. The “parent antibody” which provides at least one antigen binding specificity of the multivalent and or multispecific binding proteins may be one which is internalized (and/or catabolized) by a cell expressing an antigen to which the antibody binds; and/or may be an agonist, cell death-inducing, and/or apoptosis-inducing antibody, and the multivalent and or multispecific binding protein as described herein may display improvement(s) in one or more of these properties. Moreover, the parent antibody may lack any one or more of these properties, but may be endowed with them when constructed as a multivalent binding protein as described herein.

[0065] In another embodiment the binding protein has an on rate constant (Kₒₙ) to one or more targets of: at least about 10² M⁻¹s⁻¹; at least about 10³ M⁻¹s⁻¹; at least about 10⁴ M⁻¹s⁻¹; at least about 10⁵ M⁻¹ s⁻¹; or at least about 10⁶ M⁻¹s⁻¹, as measured by surface plasmon resonance. In an embodiment, the binding protein has an on rate constant (Kₒₙ) to one or more targets between about 10² M⁻¹s⁻¹ and about 10³ M⁻¹s⁻¹; between about 10³ M⁻¹s⁻¹ and about 10⁴ M⁻¹s⁻¹; between about 10⁴ M⁻¹s⁻¹ and about 10⁵ M⁻¹s⁻¹; or between about 10⁵ M⁻¹s⁻¹ and about 10⁶ M⁻¹s⁻¹, as measured by surface plasmon resonance.

[0066] In another embodiment the binding protein has an off rate constant (K_{off}) for one or more targets of: at most about 10⁻³s⁻¹; at most about 10⁻⁴s⁻¹; at most about 10⁻⁵s⁻¹; or at most about 10⁻⁶s⁻¹, as measured by surface plasmon resonance. In an embodiment, the binding protein has an off rate constant (K_{off}) to one or more targets of about 10⁻³s⁻¹ to about 10⁻⁴s⁻¹; of about 10⁻⁴s⁻¹ to about 10⁻⁵s⁻¹; or of about 10⁻⁵s⁻¹ to about 10⁻⁶s⁻¹, as measured by surface plasmon resonance.

[0067] In another embodiment the binding protein has a dissociation constant (K_{D}) to one or more targets of: at most about 10⁻⁷M; at most about 10⁻⁸M; at most about 10⁻⁹M; at most about 10⁻¹⁰M at most about 10⁻¹¹M; at most about 10⁻¹²M; or at most 10⁻¹³M. In an embodiment, the binding protein has a dissociation constant (K_{D}) to its targets of about 10⁻⁷M to about 10⁻⁸M; of about 10⁻⁸M to about 10⁻⁹M; of about 10⁻⁹M to about 10⁻¹⁰M; of about 10⁻¹⁰M to about 10⁻¹¹M; of about 10⁻¹¹M to about 10⁻¹²M; or of about 10⁻¹² to M about 10⁻¹³M.

[0068] In another embodiment, the binding protein described herein is a conjugate further comprising an agent. In another embodiment, the agent is an immunoadhesion molecule, an imaging agent, a therapeutic agent, or a cytotoxic agent. In an embodiment, the imaging agent is a radiolabel, an enzyme, a fluorescent label, a luminescent label, a bioluminescent label, a magnetic label, or biotin. In another embodiment, the radiolabel is: ³H, ¹⁴C, ³⁵S, ⁹⁰Y, ⁹⁹Tc, ¹¹¹In, ¹²⁵I, ¹³¹I, ¹⁷⁷Lu, ¹⁶⁶Ho, or ¹⁵³Sm. In yet another embodiment, the therapeutic or cytotoxic agent is an anti-metabolite, an alkylating agent, an antibiotic, a growth factor, a cytokine, an anti-angiogenic agent, an anti-mitotic agent, an anthracycline, toxin, or an apoptotic agent.

[0069] In another embodiment, the binding protein described herein is a crystallized binding protein and exists as a crystal. In an embodiment, the crystal is a carrier-free pharmaceutical controlled release crystal. In yet another embodiment, the crystallized binding protein has a greater half life in vivo than the soluble counterpart of the binding protein. In still another embodiment, the crystallized binding protein retains biological activity.

[0070] In another embodiment, the binding protein described herein is glycosylated. For example, the glycosylation is a human glycosylation pattern.

[0071] An isolated nucleic acid encoding any one of the binding proteins disclosed herein is also provided. A further embodiment provides a vector comprising the isolated nucleic acid disclosed herein wherein the vector is pcDNA; pTT (Durocher et al. (2002) Nucleic Acids Res. 30(2); pTT3 (pTT with additional multiple cloning site; pEFBOS (Mizushima and Nagata (1990) Nucleic Acids Res. 18(17); pBV; pJV; pcDNA3.1 TOPO; pEF6 TOPO; pBOS-hCγ1, pHybE or pBJ. In an embodiment, the vector is a vector disclosed in US Patent Publication No. 20090239259.

[0072] In another aspect a host cell is transformed with the vector disclosed herein. In an embodiment, the host cell is a prokaryotic cell. In another embodiment, the host cell is E. coli. In a related embodiment the host cell is a eukaryotic cell. In another embodiment, the eukaryotic cell is a protist cell, an animal cell, a plant cell, or a fungal cell. In yet another embodiment, the host cell is a mammalian cell including, but not limited to, CHO, COS; NS0, SP2, PER.C6 or a fungal cell, such as Saccharomyces cerevisiae, or an insect cell, such as Sf9.

[0073] In an embodiment, two or more, e.g., with different specificities, are produced in a single recombinant host cell. For example, the expression of a mixture of antibodies has been called Oligoclonics™, (Merus B.V., The Netherlands) U.S. Pat. Nos. 7,262,028; 7,429,486.

[0074] A method of producing a binding protein disclosed herein comprising culturing any one of the host cells also disclosed herein in a culture medium under conditions sufficient to produce the binding protein is provided. In an embodiment, 50%-75% of the binding protein produced by this method is a dual specific tetravalent binding protein. In a particular embodiment, 75%-90% of the binding protein produced by this method is a dual specific tetravalent binding protein. In a particular embodiment, 90%-95% of the binding protein produced is a dual specific tetravalent binding protein.

[0075] One embodiment provides a composition for the release of a binding protein wherein the composition comprises a formulation that in turn comprises a crystallized binding protein, as disclosed herein, and an ingredient, and at least one polymeric carrier. For example, the polymeric carrier is: poly (acrylic acid), poly (cyanoacrylates), poly (amino acids), poly (anhydrides), poly (depsipeptide), poly (esters), poly (lactic acid), poly (lactic-co-glycolic acid) or PLGA, poly (b-hydroxybutryate), poly (caprolactone), poly (dioxanone); poly (ethylene glycol), poly ((hydroxypropyl) methacrylamide, poly [(organo)phosphazene], poly (ortho esters), poly (vinyl alcohol), poly (vinylpyrrolidone), maleic anhydride-alkyl vinyl ether copolymers, pluronic polyols, albumin, alginate, cellulose and cellulose derivatives, collagen, fibrin, gelatin, hyaluronic acid, oligosaccharides, glycaminoglycans, sulfated polysaccharides, or blends and copolymers thereof. For example, the ingredient may be albumin, sucrose, trehalose, lactitol, gelatin, hydroxypropyl-β-cyclodextrin, methoxypolyethylene glycol, or polyethylene glycol. Another embodiment provides a method for treating a mammal comprising the step of administering to the mammal an effective amount of the composition disclosed herein.

[0076] A pharmaceutical composition comprising a binding protein, as disclosed herein and a pharmaceutically acceptable carrier is provided. In a further embodiment the pharmaceutical composition comprises at least one additional therapeutic agent for treating a disorder. For example, the additional agent may be a therapeutic agent, an imaging agent, a cytotoxic agent, an angiogenesis inhibitor (including but not limited to an anti-VEGF antibody or a VEGF-trap), a kinase inhibitor (including but not limited to a KDR and a TIE-2 inhibitor), a co-stimulation molecule blocker (including but not limited to anti-B7.1, anti-B7.2, CTLA4-Ig, anti-CD20), an adhesion molecule blocker (including but not limited to an anti-LFA-1 antibody, an anti-E/L selectin antibody, a small molecule inhibitor), an anti-cytokine antibody or functional fragment thereof (including but not limited to an anti-IL-18, an anti-TNF, and an anti-IL-6/cytokine receptor antibody), methotrexate, cyclosporin, rapamycin, FK506, a detectable label or reporter, a TNF antagonist, an antirheumatic, a muscle relaxant, a narcotic, a non-steroid anti-inflammatory drug (NSAID), an analgesic, an anesthetic, a sedative, a local anesthetic, a neuromuscular blocker, an antimicrobial, an antipsoriatic, a corticosteriod, an anabolic steroid, an erythropoietin, an immunization, an immunoglobulin, an immunosuppressive, a growth hormone, a hormone replacement drug, a radiopharmaceutical, an antidepressant, an antipsychotic, a stimulant, an asthma medication, a beta agonist, an inhaled steroid, an epinephrine or analog, a cytokine, or a cytokine antagonist.

[0077] A method for treating a human subject suffering from a disorder in which the target, or targets, capable of being bound by the binding protein disclosed herein is detrimental, comprising administering to the human subject a binding protein disclosed herein such that the activity of the target, or targets in the human subject is inhibited and one of more symptoms is alleviated or treatment is achieved is provided. In an embodiment, diseases that can be treated or diagnosed with the compositions and methods include, but are not limited to, immune and inflammatory elements, such as autoimmune diseases, particularly those assocated with inflammation, including Crohn's disease, psoriasis (including plaque psoriasis), arthritis (including rheumatoid arthritis, psoratic arthritis, osteoarthritis, or juvenile idiopathic arthritis), multiple sclerosis, ankylosing spondylitis, spondylosing arthropathy, systemic lupus erythematosus, uveitis, multiple sclerosis, sepsis, and neurodegenerative diseases, neuronal regeneration, spinal cord injury, and primary and metastatic cancers. In another embodiment, the disorder is a respiratory disorder; asthma; allergic and nonallergic asthma; asthma due to infection; asthma due to infection with respiratory syncytial virus (RSV); chronic obstructive pulmonary disease (COPD); a condition involving airway inflammation; eosinophilia; fibrosis and excess mucus production; cystic fibrosis; pulmonary fibrosis; an atopic disorder; atopic dermatitis; urticaria; eczema; allergic rhinitis; allergic enterogastritis; an inflammatory and/or autoimmune condition of the skin; an inflammatory and/or autoimmune condition of gastrointestinal organs; inflammatory bowel diseases (IBD); ulcerative colitis; Chrohn's disease; an inflammatory and/or autoimmune condition of the liver; liver cirrhosis; liver fibrosis; liver fibrosis caused by hepatitis B and/or C virus; scleroderma; tumors or cancers; hepatocellular carcinoma; glioblastoma; lymphoma; Hodgkin's lymphoma; a viral infection; a bacterial infection; a parasitic infection; HTLV-1 infection; suppression of expression of protective type 1 immune responses, and suppression of expression of a protective type 1 immune response during vaccination.

[0078] In an embodiment, the antibodies or antigen-binding portions thereof, are used to treat cancer or in the prevention or inhibition of metastases from the tumors described herein either when used alone or in combination with radiotherapy and/or other chemotherapeutic agents.

[0079] In another aspect a method of treating a patient suffering from a disorder comprising the step of administering any one of the binding proteins disclosed herein before, concurrently, or after the administration of a second agent, as discussed herein is provided. In a particular embodiment the second agent is budenoside, epidermal growth factor, corticosteroids, cyclosporin, sulfasalazine, aminosalicylates, 6-mercaptopurine, azathioprine, metronidazole, lipoxygenase inhibitors, mesalamine, olsalazine, balsalazide, antioxidants, thromboxane inhibitors, IL-1 receptor antagonists, anti-IL-1β mAbs, anti-IL-6 or IL-6 receptor mAbs, growth factors, elastase inhibitors, pyridinyl-imidazole compounds, antibodies or agonists of TNF, LT, IL-1, IL-2, IL-6, IL-7, IL-8, IL-12, IL-13, IL-15, IL-16, IL-18, IL-23, EMAP-II, GM-CSF, FGF, and PDGF, antibodies of CD2, CD3, CD4, CD8, CD-19, CD25, CD28, CD30, CD40, CD45, CD69, CD90 or their ligands, methotrexate, cyclosporin, FK506, rapamycin, mycophenolate mofetil, leflunomide, NSAIDs, ibuprofen, corticosteroids, prednisolone, phosphodiesterase inhibitors, adensosine agonists, antithrombotic agents, complement inhibitors, adrenergic agents, IRAK, NIK, IKK, p38, MAP kinase inhibitors, IL-1β converting enzyme inhibitors, TNFα-converting enzyme inhibitors, T-cell signalling inhibitors, metalloproteinase inhibitors, sulfasalazine, azathioprine, 6-mercaptopurines, angiotensin converting enzyme inhibitors, soluble cytokine receptors, soluble p55 TNF receptor, soluble p75 TNF receptor, sIL-1R1, sIL-1R11, sIL-6R, antiinflammatory cytokines, IL-4, IL-10, IL-11, IL-13, or TGFβ. In a particular embodiment the pharmaceutical compositions disclosed herein are administered to the patient by parenteral, subcutaneous, intramuscular, intravenous, intrarticular, intrabronchial, intraabdominal, intracapsular, intracartilaginous, intracavitary, intracelial, intracerebellar, intracerebroventricular, intracolic, intracervical, intragastric, intrahepatic, intramyocardial, intraosteal, intrapelvic, intrapericardiac, intraperitoneal, intrapleural, intraprostatic, intrapulmonary, intrarectal, intrarenal, intraretinal, intraspinal, intrasynovial, intrathoracic, intrauterine, intravesical, bolus, vaginal, rectal, buccal, sublingual, intranasal, or transdermal administration. At least one anti-idiotype antibody to at least one binding protein are also provided. The anti-idiotype antibody includes any protein or peptide containing molecule that comprises at least a portion of an immunoglobulin molecule such as, but not limited to, at least one complementarily determining region (CDR) of a heavy or light chain or a ligand binding portion thereof, a heavy chain or light chain variable region, a heavy chain or light chain constant region, a framework region, or any portion thereof, that can be incorporated into a binding protein provided herein.

[0080] A method of determining the presence, amount or concentration of TNF (or a fragment thereof) in a test sample is provided. The method comprises assaying the test sample for the antigen (or a fragment thereof) by an immunoassay. The immunoassay (i) employs at least one binding protein and at least one detectable label and (ii) comprises comparing a signal generated by the detectable label as a direct or indirect indication of the presence, amount or concentration of the antigen (or a fragment thereof) in the test sample to a signal generated as a direct or indirect indication of the presence, amount or concentration of the antigen (or a fragment thereof) in a control or a calibrator. The calibrator is optionally part of a series of calibrators in which each of the calibrators differs from the other calibrators in the series by the concentration of the antigen (or a fragment thereof). One of the at least one binding protein comprises the binding protein, such as the DVD-binding protein, disclosed herein. The method can comprise (i) contacting the test sample with at least one capture agent, which binds to an epitope on the antigen (or a fragment thereof) so as to form a capture agent/antigen (or a fragment thereof) complex, (ii) contacting the capture agent/antigen (or a fragment thereof) complex with at least one detection agent, which comprises a detectable label and binds to an epitope on the antigen (or a fragment thereof) that is not bound by the capture agent, to form a capture agent/antigen (or a fragment thereof)/detection agent complex, and (iii) determining the presence, amount or concentration of the antigen (or a fragment thereof) in the test sample based on the signal generated by the detectable label in the capture agent/antigen (or a fragment thereof)/detection agent complex formed in (ii), wherein at least one capture agent and/or at least one detection agent is the at least one binding protein.

[0081] Alternatively, the method can comprise (i) contacting the test sample with at least one capture agent, which binds to an epitope on the antigen (or a fragment thereof) so as to form a capture agent/antigen (or a fragment thereof) complex, and simultaneously or sequentially, in either order, contacting the test sample with detectably labeled antigen (or a fragment thereof), which can compete with any antigen (or a fragment thereof) in the test sample for binding to the at least one capture agent, wherein any antigen (or a fragment thereof) present in the test sample and the detectably labeled antigen compete with each other to form a capture agent/antigen (or a fragment thereof) complex and a capture agent/detectably labeled antigen (or a fragment thereof) complex, respectively, and (ii) determining the presence, amount or concentration of the antigen (or a fragment thereof) in the test sample based on the signal generated by the detectable label in the capture agent/detectably labeled antigen (or a fragment thereof) complex formed in (ii), wherein at least one capture agent is the at least one binding protein and wherein the signal generated by the detectable label in the capture agent/detectably labeled antigen (or a fragment thereof) complex is inversely proportional to the amount or concentration of antigen (or a fragment thereof) in the test sample.

[0082] In some embodiments, the methods disclosed herein comprises assaying the test sample for the antigen (or a fragment thereof) by an immunoassay. The immunoassay (i) employs at least one binding protein and at least one detectable label and (ii) comprises comparing a signal generated by the detectable label as a direct or indirect indication of the presence, amount or concentration of the antigen (or a fragment thereof) in the test sample to a signal generated as a direct or indirect indication of the presence, amount or concentration of the antigen (or a fragment thereof) in a control or a calibrator. The calibrator is optionally part of a series of calibrators in which each of the calibrators differs from the other calibrators in the series by the concentration of the antigen (or a fragment thereof). One of the at least one binding protein comprises the binding protein, such as the DVD-binding protein, disclosed herein.

[0083] If the test sample is from a patient, the methods disclosed herein can further comprise diagnosing, prognosticating, or assessing the efficacy of therapeutic/prophylactic treatment of the patient. If the methods further comprises assessing the efficacy of therapeutic/prophylactic treatment of the patient, the methods optionally further comprises modifying the therapeutic/prophylactic treatment of the patient as needed to improve efficacy. The methods disclosed herein can be adapted for use in an automated system or a semi-automated system.

[0084] Also provided is a kit for assaying a test sample for an antigen (or a fragment thereof). The kit comprises at least one component for assaying the test sample for an antigen (or a fragment thereof) and instructions for assaying the test sample for an antigen (or a fragment thereof), wherein the at least one component includes at least one composition comprising a binding protein disclosed herein.

### BRIEF DESCRIPTION OF THE DRAWINGS

[0085] FIG. 1A is a schematic representation of Dual Variable Domain (DVD) constructs and shows the strategy for generation of a DVD-binding protein from two parent antibodies.

[0086] FIG. 1B is a schematic representation of constructs DVD1-Ig, DVD2-Ig, and two chimeric mono-specific antibody clones.

### DETAILED DESCRIPTION OF THE INVENTION

[0087] Multivalent and/or multispecific binding proteins capable of binding two or more antigens are provided. Dual variable domain binding proteins (DVD-binding proteins), and pharmaceutical compositions thereof, as well as nucleic acids, recombinant expression vectors and host cells for making such DVD-binding proteins. Methods of using the DVD-binding proteins to detect specific antigens, either in vitro or in vivo are also provided.

[0088] Unless otherwise defined herein, scientific and technical terms used herein have the meanings that are commonly understood by those of ordinary skill in the art. In the event of any latent ambiguity, definitions provided herein take precedent over any dictionary or extrinsic definition. Unless otherwise required by context, singular terms shall include pluralities and plural terms shall include the singular. The use of “or” means “and/or” unless stated otherwise. The use of the term “including”, as well as other forms, such as “includes” and “included”, is not limiting. Terms such as “element” or “component” encompass both elements and components comprising one unit and elements and components that comprise more than one subunit unless specifically stated otherwise.

[0089] Generally, nomenclatures used in connection with cell and tissue culture, molecular biology, immunology, microbiology, genetics and protein and nucleic acid chemistry and hybridization described herein are those well known and commonly used in the art. The methods and techniques provided herein are generally performed according to conventional methods well known in the art and as described in various general and more specific references that are cited and discussed throughout the present specification unless otherwise indicated. Enzymatic reactions and purification techniques are performed according to manufacturer's specifications, as commonly accomplished in the art or as described herein. The nomenclatures used in connection with, and the laboratory procedures and techniques of, analytical chemistry, synthetic organic chemistry, and medicinal and pharmaceutical chemistry described herein are those well known and commonly used in the art. Standard techniques are used for chemical syntheses, chemical analyses, pharmaceutical preparation, formulation, and delivery, and treatment of patients.

[0090] That the disclosure may be more readily understood, select terms are defined below.

[0091] The term “antibody” broadly refers to any immunoglobulin (Ig) molecule comprised of four polypeptide chains, two heavy (H) chains and two light (L) chains, or any functional fragment, mutant, variant, or derivation thereof, which retains the essential epitope binding features of an Ig molecule. Such mutant, variant, or derivative antibody formats are known in the art, and nonlimiting embodiments thereof are discussed herein.

[0092] In a full-length antibody, each heavy chain is comprised of a heavy chain variable region (abbreviated herein as HCVR or VH) and a heavy chain constant region. The heavy chain constant region is comprised of three domains, CH1, CH2 and CH3. Each light chain is comprised of a light chain variable region (abbreviated herein as LCVR or VL) and a light chain constant region. The light chain constant region is comprised of one domain, CL. The VH and VL regions can be further subdivided into regions of hypervariability, termed complementarity determining regions (CDR), interspersed with regions that are more conserved, termed framework regions (FR). Each VH and VL is composed of three CDRs and four FRs, arranged from amino-terminus to carboxy-terminus in the following order: FR1, CDR1, FR2, CDR2, FR3, CDR3, and FR4. Immunoglobulin molecules can be of any type (e.g., IgG, IgE, IgM, IgD, IgA and IgY), class (e.g., IgG 1, IgG2, IgG 3, IgG4, IgA1 and IgA2), or subclass.

[0093] The term “Fc region” is used to define the C-terminal region of an immunoglobulin heavy chain, which may be generated by papain digestion of an intact antibody. The Fc region may be a native sequence Fc region or a variant Fc region. The Fc region of an immunoglobulin generally comprises two constant domains, a CH2 domain and a CH3 domain, and optionally comprises a CH4 domain. Replacements of amino acid residues in the Fc portion to alter antibody effector function are known in the art (U.S. Pat. Nos. 5,648,260 and 5,624,821). The Fc portion of an antibody mediates several important effector functions, e.g., cytokine induction, ADCC, phagocytosis, complement dependent cytotoxicity (CDC), and half-life/clearance rate of antibody and antigen-antibody complexes. In some cases these effector functions are desirable for a therapeutic antibody but in other cases might be unnecessary or even deleterious, depending on the therapeutic objectives. Certain human IgG isotypes, particularly IgG1 and IgG3, mediate ADCC and CDC via binding to FcγR5 and complement C1q, respectively. Neonatal Fc receptors (FcRn) are the critical components determining the circulating half-life of antibodies. In still another embodiment at least one amino acid residue is replaced in the constant region of the antibody, for example the Fc region of the antibody, such that effector functions of the antibody are altered. The dimerization of two identical heavy chains of an immunoglobulin is mediated by the dimerization of CH3 domains and is stabilized by the disulfide bonds within the hinge region (Huber et al. (1976) Nature 264: 415-20; Thies et al. (1999) J. Mol. Biol. 293: 67-79). Mutation of cysteine residues within the hinge regions to prevent heavy chain-heavy chain disulfide bonds will destabilize dimeration of CH3 domains. Residues responsible for CH3 dimerization have been identified (Dall'Acqua (1998) Biochem. 37: 9266-73). Therefore, it is possible to generate a monovalent half-Ig. Interestingly, these monovalent half Ig molecules have been found in nature for both IgG and IgA subclasses (Seligman (1978) Ann. Immunol. 129: 855-70; Biewenga et al. (1983) Clin. Exp. Immunol. 51: 395-400). The stoichiometry of FcRn: Ig Fc region has been determined to be 2:1 (West et al. (2000) Biochem. 39: 9698-708), and half Fc is sufficient for mediating FcRn binding (Kim et al. (1994) Eur. J. Immunol. 24: 542-548). Mutations to disrupt the dimerization of CH3 domain may not have greater adverse effect on its FcRn binding as the residues important for CH3 dimerization are located on the inner interface of CH3 b sheet structure, whereas the region responsible for FcRn binding is located on the outside interface of CH2-CH3 domains. However the half Ig molecule may have certain advantages in tissue penetration due to its smaller size than that of a regular antibody. In one embodiment at least one amino acid residue is replaced in the constant region of the binding proteins provided herein, for example the Fc region, such that the dimerization of the heavy chains is disrupted, resulting in half DVD-binding protein molecules. The anti-inflammatory activity of IgG is dependent on sialylation of the N-linked glycan of the IgG Fc fragment. The precise glycan requirements for anti-inflammatory activity has been determined, such that an appropriate IgG1 Fc fragment can be created, thereby generating a fully recombinant, sialylated IgG1 Fc with greatly enhanced potency (Anthony et al. (2008) Science 320:373-376).

[0094] The term “antigen-binding portion” of an antibody refers to one or more fragments of an antibody that retain the ability to specifically bind to an antigen. It has been shown that the antigen-binding function of an antibody can be performed by fragments of a full-length antibody. Such antibody embodiments may also be bispecific, dual specific, or multi-specific formats; specifically binding to two or more different antigens. Examples of binding fragments encompassed within the term “antigen-binding portion” of an antibody include (i) a Fab fragment, a monovalent fragment consisting of the VL, VH, CL and CH1 domains; (ii) a F(ab′)₂ fragment, a bivalent fragment comprising two Fab fragments linked by a disulfide bridge at the hinge region; (iii) a Fd fragment consisting of the VH and CH1 domains; (iv) a Fv fragment consisting of the VL and VH domains of a single arm of an antibody, (v) a dAb fragment (Ward et al. (1989) Nature 341:544-546, PCT Publication No. WO 90/05144), which comprises a single variable domain; and (vi) an isolated complementarity determining region (CDR). Furthermore, although the two domains of the Fv fragment, VL and VH, are coded for by separate genes, they can be joined, using recombinant methods, by a synthetic linker that enables them to be made as a single protein chain in which the VL and VH regions pair to form monovalent molecules (known as single chain Fv (scFv); see e.g., Bird et al. (1988) Science 242:423-426; and Huston et al. (1988) Proc. Natl. Acad. Sci. USA 85:5879-5883). Such single chain antibodies are also intended to be encompassed within the term “antigen-binding portion” of an antibody. Other forms of single chain antibodies, such as diabodies are also encompassed. Diabodies are bivalent, bispecific antibodies in which VH and VL domains are expressed on a single polypeptide chain, but using a linker that is too short to allow for pairing between the two domains on the same chain, thereby forcing the domains to pair with complementary domains of another chain and creating two antigen binding sites (see e.g., Holliger et al. (1993) Proc. Natl. Acad. Sci. USA 90:6444-6448; Poljak et al. (1994) Structure 2:1121-1123). Such antibody binding portions are known in the art (Kontermann and Dubel eds., Antibody Engineering (2001) Springer-Verlag. New York. 790 pp. (ISBN 3-540-41354-5). In addition single chain antibodies also include “linear antibodies” comprising a pair of tandem Fv segments (VH-CH1-VH-CH1) which, together with complementary light chain polypeptides, form a pair of antigen binding regions (Zapata et al. (1995) Protein Eng. 8(10):1057-1062; and U.S. Pat. No. 5,641,870).

[0095] The term “multivalent binding protein” is used throughout this specification to denote a binding protein comprising two or more antigen binding sites. In an embodiment, the multivalent binding protein is engineered to have the three or more antigen binding sites, and is generally not a naturally occurring antibody. The term “multispecific binding protein” refers to a binding protein capable of binding two or more related or unrelated targets. Dual variable domain (DVD) binding proteins provided herein comprise two or more antigen binding sites and are tetravalent or multivalent binding proteins. DVD-binding proteins may be monospecific, i.e., capable of binding one antigen or multispecific, i.e. capable of binding two or more antigens. DVD-binding proteins comprising two heavy chain DVD polypeptides and two light chain DVD polypeptides are referred to as DVD. Each half of a DVD-binding protein comprises a heavy chain DVD polypeptide, and a light chain DVD polypeptide, and two antigen binding sites. Each binding site comprises a heavy chain variable domain and a light chain variable domain with a total of 6 CDRs involved in antigen binding per antigen binding site.

[0096] The term “bispecific antibody” refers to full-length antibodies that are generated by quadroma technology (see Milstein and Cuello (1983) Nature 305(5934): 537-40), by chemical conjugation of two different monoclonal antibodies (see Staerz et al. (1985) Nature 314(6012): 628-31), or by knob-into-hole or similar approaches which introduces mutations in the Fc region (see Holliger et al. (1993) Proc. Natl. Acad. Sci. USA 90(14): 6444-6448), resulting in multiple different immunoglobulin species of which only one is the functional bispecific antibody. By molecular function, a bispecific antibody binds one antigen (or epitope) on one of its two binding arms (one pair of HC/LC), and binds a different antigen (or epitope) on its second arm (a different pair of HC/LC). By this definition, a bispecific antibody has two distinct antigen binding arms (in both specificity and CDR sequences), and is monovalent for each antigen to which it binds.

[0097] The term “dual-specific antibody” refers to full-length antibodies that can bind two different antigens (or epitopes) in each of its two binding arms (a pair of HC/LC) (see PCT Publication No. WO 02/02773). Accordingly a dual-specific binding protein has two identical antigen binding arms, with identical specificity and identical CDR sequences, and is bivalent for each antigen to which it binds.

[0098] A “functional antigen binding site” of a binding protein is one that is capable of binding a target antigen. The antigen binding affinity of the antigen binding site is not necessarily as strong as the parent antibody from which the antigen binding site is derived, but the ability to bind antigen may be measurable using any one of a variety of methods known for evaluating antibody binding to an antigen. Moreover, the antigen binding affinity of each of the antigen binding sites of a multivalent antibody herein need not be quantitatively the same.

[0099] The term “linker” is used to denote polypeptides comprising two or more amino acid residues joined by peptide bonds and are used to link one or more antigen binding portions. Such linker polypeptides are well known in the art (see e.g., Holliger et al. (1993) Proc. Natl. Acad. Sci. USA 90:6444-6448; Poljak et al. (1994) Structure 2:1121-1123).

[0100] An “immunoglobulin constant domain” refers to a heavy or light chain constant domain. Human IgG heavy chain and light chain constant domain amino acid sequences are known in the art.

[0101] The term “monoclonal antibody” or “mAb” refers to an antibody obtained from a population of substantially homogeneous antibodies, i.e., the individual antibodies comprising the population are identical except for possible naturally occurring mutations that may be present in minor amounts. Monoclonal antibodies are highly specific, being directed against a single antigen. Furthermore, in contrast to polyclonal antibody preparations that typically include different antibodies directed against different determinants (epitopes), each mAb is directed against a single determinant on the antigen. The modifier “monoclonal” is not to be construed as requiring production of the antibody by any particular method.

[0102] The term “human antibody” includes antibodies having variable and constant regions derived from human germline immunoglobulin sequences. The human antibodies provided herein may include amino acid residues not encoded by human germline immunoglobulin sequences (e.g., mutations introduced by random or site-specific mutagenesis in vitro or by somatic mutation in vivo), for example in the CDRs and in particular CDR3. However, the term “human antibody” does not include antibodies in which CDR sequences derived from the germline of another mammalian species, such as a mouse, have been grafted onto human framework sequences.

[0103] The term “recombinant human antibody”, as used herein, is intended to include all human antibodies that are prepared, expressed, created or isolated by recombinant means, such as antibodies expressed using a recombinant expression vector transfected into a host cell, antibodies isolated from a recombinant, combinatorial human antibody library (Hoogenboom H. R. (1997) TIB Tech. 15:62-70; Azzazy H., and Highsmith W. E. (2002) Clin. Biochem. 35:425-445; Gavilondo J. V., and Larrick J. W. (2002) BioTechniques 29:128-145; Hoogenboom H., and Chames P. (2000) Immunology Today 21:371-378), antibodies isolated from an animal (e.g., a mouse) that is transgenic for human immunoglobulin genes (see, Taylor, L. D., et al. (1992) Nucl. Acids Res. 20:6287-6295; Kellermann S-A. and Green L. L. (2002) Current Opinion in Biotechnology 13:593-597; Little M. et al. (2000) Immunology Today 21:364-370) or antibodies prepared, expressed, created or isolated by any other means that involves splicing of human immunoglobulin gene sequences to other DNA sequences. Such recombinant human antibodies have variable and constant regions derived from human germline immunoglobulin sequences. In certain embodiments, however, such recombinant human antibodies are subjected to in vitro mutagenesis (or, when an animal transgenic for human Ig sequences is used, in vivo somatic mutagenesis) and thus the amino acid sequences of the VH and VL regions of the recombinant antibodies are sequences that, while derived from and related to human germline VH and VL sequences, may not naturally exist within the human antibody germline repertoire in vivo.

[0104] An “affinity matured” antibody is an antibody with one or more alterations in one or more CDRs thereof which result an improvement in the affinity of the antibody for antigen, compared to a parent antibody which does not possess those alteration(s). Exemplary affinity matured antibodies will have nanomolar or even picomolar affinities for the target antigen. Affinity matured antibodies are produced by procedures known in the art. Marks et al. (1992) BioTechnology 10:779-783 describes affinity maturation by VH and VL domain shuffling. Random mutagenesis of CDR and/or framework residues is described by: e.g. Barbas et al. (1994) Proc. Nat. Acad. Sci, USA 91:3809-3813 and selective mutation at selective mutagenesis positions, contact or hypermutation positions with an activity enhancing amino acid residue as described in U.S. Pat. No. 6,914,128.

[0105] The term “chimeric antibody” refers to antibodies which comprise heavy and light chain variable region sequences from one species and constant region sequences from another species, such as antibodies having murine heavy and light chain variable regions linked to human constant regions.

[0106] The term “CDR-grafted antibody” refers to antibodies which comprise heavy and light chain variable region sequences from one species but in which the sequences of one or more of the CDR regions of VH and/or VL are replaced with CDR sequences of another species, such as antibodies having murine heavy and light chain variable regions in which one or more of the murine CDRs (e.g., CDR3) has been replaced with human CDR sequences.

[0107] The term “humanized antibody” refers to antibodies which comprise heavy and light chain variable region sequences from a non-human species (e.g., a mouse) but in which at least a portion of the VH and/or VL sequence has been altered to be more “human-like”, i.e., more similar to human germline variable sequences. One type of humanized antibody is a CDR-grafted antibody, in which human CDR sequences are introduced into non-human VH and VL sequences to replace the corresponding nonhuman CDR sequences. Also “humanized antibody” is an antibody or a variant, derivative, analog or fragment thereof which immunospecifically binds to an antigen of interest and which comprises a framework (FR) region having substantially the amino acid sequence of a human antibody and a CDR having substantially the amino acid sequence of a non-human antibody. The term “substantially” in the context of a CDR refers to a CDR having an amino acid sequence at least 80%, at least 85%, at least 90%, at least 95%, at least 98% or at least 99% identical to the amino acid sequence of a non-human antibody CDR. A humanized antibody comprises substantially all of at least one, and typically two, variable domains (Fab, Fab′, F(ab′)2, FabC, Fv) in which all or substantially all of the CDR regions correspond to those of a non-human immunoglobulin (i.e., donor antibody) and all or substantially all of the FR regions are those of a human immunoglobulin consensus sequence. In an embodiment, a humanized antibody also comprises at least a portion of an immunoglobulin Fc region, typically that of a human immunoglobulin. In some embodiments, a humanized antibody contains both the light chain as well as at least the variable domain of a heavy chain. The antibody also may include the CH1, hinge, CH2, CH3, and CH4 regions of the heavy chain. In some embodiments, a humanized antibody only contains a humanized light chain. In some embodiments, a humanized antibody only contains a humanized heavy chain. In specific embodiments, a humanized antibody only contains a humanized variable domain of a light chain and/or humanized heavy chain.

[0108] The terms “Kabat numbering”, “Kabat definitions” and “Kabat labeling” are used interchangeably herein. These terms, which are recognized in the art, refer to a system of numbering amino acid residues which are more variable (i.e. hypervariable) than other amino acid residues in the heavy and light chain variable regions of an antibody, or an antigen binding portion thereof (Kabat et al. (1971) Ann. NY Acad., Sci. 190:382-391 and, Kabat, E. A., et al. (1991) Sequences of Proteins of Immunological Interest, Fifth Edition, U.S. Department of Health and Human Services, NIH Publication No. 91-3242). For the heavy chain variable region, the hypervariable region ranges from amino acid positions 31 to 35 for CDR1, amino acid positions 50 to 65 for CDR2, and amino acid positions 95 to 102 for CDR3. For the light chain variable region, the hypervariable region ranges from amino acid positions 24 to 34 for CDR1, amino acid positions 50 to 56 for CDR2, and amino acid positions 89 to 97 for CDR3.

[0109] The term “CDR” refers to the complementarity determining region within antibody variable sequences. There are three CDRs in each of the variable regions of the heavy chain and the light chain, which are designated CDR1, CDR2 and CDR3, for each of the variable regions. The term “CDR set” refers to a group of three CDRs that occur in a single variable region capable of binding the antigen. The exact boundaries of these CDRs have been defined differently according to different systems. The system described by Kabat (Kabat et al., Sequences of Proteins of Immunological Interest (National Institutes of Health, Bethesda, Md. (1987) and (1991)) not only provides an unambiguous residue numbering system applicable to any variable region of an antibody, but also provides precise residue boundaries defining the three CDRs. These CDRs may be referred to as Kabat CDRs. Chothia and coworkers (Chothia and Lesk (1987) J. Mol. Biol. 196:901-917; Chothia et al. (1989) Nature 342:877-883) found that certain sub-portions within Kabat CDRs adopt nearly identical peptide backbone conformations, despite having great diversity at the level of amino acid sequence. These sub-portions were designated as L1, L2 and L3 or H1, H2 and H3 where the “L” and the “H” designates the light chain and the heavy chain regions, respectively. These regions may be referred to as Chothia CDRs, which have boundaries that overlap with Kabat CDRs. Other boundaries defining CDRs overlapping with the Kabat CDRs have been described by Padlan (1995) FASEB J. 9:133-139 and MacCallum (1996) J. Mol. Biol. 262(5):732-45). Still other CDR boundary definitions may not strictly follow one of the herein systems, but will nonetheless overlap with the Kabat CDRs, although they may be shortened or lengthened in light of prediction or experimental findings that particular residues or groups of residues or even entire CDRs do not significantly impact antigen binding. The methods used herein may utilize CDRs defined according to any of these systems, although certain embodiments use Kabat or Chothia defined CDRs.

[0110] The term “framework” or “framework sequence” refers to the remaining sequences of a variable region minus the CDRs. Because the exact definition of a CDR sequence can be determined by different systems, the meaning of a framework sequence is subject to correspondingly different interpretations. The six CDRs (CDR-L1, -L2, and -L3 of light chain and CDR-H1, -H2, and -H3 of heavy chain) also divide the framework regions on the light chain and the heavy chain into four sub-regions (FR1, FR2, FR3 and FR4) on each chain, in which CDR1 is positioned between FR1 and FR2, CDR2 between FR2 and FR3, and CDR3 between FR3 and FR4. Without specifying the particular sub-regions as FR1, FR2, FR3 or FR4, a framework region, as referred by others, represents the combined FR's within the variable region of a single, naturally occurring immunoglobulin chain. A FR represents one of the four sub-regions, and FRs represents two or more of the four sub-regions constituting a framework region.

[0111] The term “germline antibody gene” or “gene fragment” refers to an immunoglobulin sequence encoded by non-lymphoid cells that have not undergone the maturation process that leads to genetic rearrangement and mutation for expression of a particular immunoglobulin. (See, e.g., Shapiro et al. (2002) Crit. Rev. Immunol. 22(3): 183-200; Marchalonis et al. (2001) Adv. Exp. Med. Biol. 484:13-30). One of the advantages provided by various embodiments stems from the recognition that germline antibody genes are more likely than mature antibody genes to conserve essential amino acid sequence structures characteristic of individuals in the species, hence less likely to be recognized as from a foreign source when used therapeutically in that species.

[0112] The term “neutralizing” refers to counteracting the biological activity of an antigen when a binding protein specifically binds to the antigen. In an embodiment, the neutralizing binding protein binds to the cytokine and reduces its biologically activity by at least about 20%, 40%, 60%, 80%, 85% or more.

[0113] The term “activity” includes activities such as the binding specificity and affinity of a DVD-binding protein for two or more antigens.

[0114] The term “epitope” includes any polypeptide determinant capable of specific binding to an immunoglobulin or T-cell receptor. In certain embodiments, epitope determinants include chemically active surface groupings of molecules such as amino acids, sugar side chains, phosphoryl, or sulfonyl, and, in certain embodiments, may have specific three dimensional structural characteristics, and/or specific charge characteristics. An epitope is a region of an antigen that is bound by an antibody. An epitope thus consists of the amino acid residues of a region of an antigen (or fragment thereof) known to bind to the complementary site on the specific binding partner. An antigenic fragment can contain more than one epitope. In certain embodiments, an antibody specifically binds an antigen when it recognizes its target antigen in a complex mixture of proteins and/or macromolecules. Antibodies “bind to the same epitope” if the antibodies cross-compete (one prevents the binding or modulating effect of the other). In addition structural definitions of epitopes (overlapping, similar, identical) are informative, but functional definitions are often more relevant as they encompass structural (binding) and functional (modulation, competition) parameters.

[0115] The term “surface plasmon resonance”, as used herein, refers to an optical phenomenon that allows for the analysis of real-time biospecific interactions by detection of alterations in protein concentrations within a biosensor matrix, for example using the BIAcore® system (BIAcore International AB, a GE Healthcare company, Uppsala, Sweden and Piscataway, N.J.). For further descriptions, see Jonsson et al. (1993) Ann. Biol. Clin. 51:19-26; Jonsson.

[0116] The term “Kₒₙ” refers to the on rate constant for association of a binding protein (e.g., an antibody) to the antigen to form the, e.g., antibody/antigen complex as is known in the art. The “Kon” also is known by the terms “association rate constant”, or “ka”, as used interchangeably herein. This value indicating the binding rate of an antibody to its target antigen or the rate of complex formation between an antibody and antigen also is shown by the equation below:

Antibody (“Ab”)+Antigen (“Ag”)→Ab−Ag.

[0117] The term “K_{off}” refers to the off rate constant for dissociation, or “dissociation rate constant”, of a binding protein (e.g., an antibody) from the, e.g., antibody/antigen complex as is known in the art. The “K_{off}” also is known by the terms “dissociation rate constant” or “k_{d}” as used interchangeably herein. This value indicates the dissociation rate of an antibody from its target antigen or separation of Ab−Ag complex over time into free antibody and antigen as shown by the equation below:

Ab+Ag←Ab−Ag.

[0118] The terms “K_{D}” and “equilibrium dissociation constant”, and refers to the value obtained in a titration measurement at equilibrium, or by dividing the dissociation rate constant (koff) by the association rate constant (kon). The association rate constant, the dissociation rate constant and the equilibrium dissociation constant, are used to represent the binding affinity of an antibody to an antigen. Methods for determining association and dissociation rate constants are well known in the art. Using fluorescence-based techniques offers high sensitivity and the ability to examine samples in physiological buffers at equilibrium. Other experimental approaches and instruments such as a BIAcore® (biomolecular interaction analysis) assay, can be used (e.g., instrument available from BIAcore International AB, a GE Healthcare company, Uppsala, Sweden). Additionally, a KinExA® (Kinetic Exclusion Assay) assay, available from Sapidyne Instruments (Boise, Id.), can also be used.

[0119] The term “operably linked” refers to a juxtaposition wherein the components described are in a relationship permitting them to function in their intended manner. A control sequence “operably linked” to a coding sequence is ligated in such a way that expression of the coding sequence is achieved under conditions compatible with the control sequences. “Operably linked” sequences include both expression control sequences that are contiguous with the gene of interest and expression control sequences that act in trans or at a distance to control the gene of interest. The term “expression control sequence” as used herein refers to polynucleotide sequences which are useful to effect the expression and processing of coding sequences to which they are ligated. Expression control sequences include appropriate transcription initiation, termination, promoter and enhancer sequences; efficient RNA processing signals such as splicing and polyadenylation signals; sequences that stabilize cytoplasmic mRNA; sequences that enhance translation efficiency (i.e., Kozak consensus sequence); sequences that enhance protein stability; and when desired, sequences that enhance protein secretion. The nature of such control sequences differs depending upon the host organism; in prokaryotes, such control sequences generally include promoter, ribosomal binding site, and transcription termination sequence; in eukaryotes, generally, such control sequences include promoters and transcription termination sequence. The term “control sequences” is intended to include components whose presence is essential for expression and processing, and can also include additional components whose presence is advantageous, for example, leader sequences and fusion partner sequences.

[0120] The term “recombinant host cell” (or simply “host cell”), is intended to refer to a cell into which exogenous DNA has been introduced. In an embodiment, the host cell comprises two more (e.g., multiple) nucleic acids encoding antibodies, such as the host cells described in U.S. Pat. No. 7,262,028, for example. It should be understood that such terms are intended to refer not only to the particular subject cell, but to the progeny of such a cell. Because certain modifications may occur in succeeding generations due to either mutation or environmental influences, such progeny may not, in fact, be identical to the parent cell, but are still included within the scope of the term “host cell” as used herein. In an embodiment, host cells include prokaryotic and eukaryotic cells selected from any of the Kingdoms of life. In another embodiment, eukaryotic cells include protist, fungal, plant and animal cells. In another embodiment, host cells include but are not limited to the prokaryotic cell line E. Coli; mammalian cell lines CHO, HEK 293, COS, NS0, SP2 and PER.C6; the insect cell line Sf9; and the fungal cell Saccharomyces cerevisiae.

[0121] Standard techniques may be used for recombinant DNA, oligonucleotide synthesis, and tissue culture and transformation (e.g., electroporation, lipofection). Enzymatic reactions and purification techniques may be performed according to manufacturer's specifications or as commonly accomplished in the art or as described herein. The foregoing techniques and procedures may be generally performed according to conventional methods well known in the art and as described in various general and more specific references that are cited and discussed throughout the present specification. See e.g., Sambrook et al. MOLECULAR CLONING: A LABORATORY MANUAL (2d ed., Cold Spring Harbor Laboratory Press, Cold Spring Harbor, N.Y. (1989)), which is incorporated herein by reference for any purpose.

[0122] “Predetermined cutoff” and “predetermined level” refer generally to an assay cutoff value that is used to assess diagnostic/prognostic/therapeutic efficacy results by comparing the assay results against the predetermined cutoff/level, where the predetermined cutoff/level already has been linked or associated with various clinical parameters (e.g., severity of disease, progression/nonprogression/improvement, etc.). While the present disclosure may provide exemplary predetermined levels, it is well-known that cutoff values may vary depending on the nature of the immunoassay (e.g., antibodies employed, etc.). It further is well within the ordinary skill of one in the art to adapt the disclosure herein for other immunoassays to obtain immunoassay-specific cutoff values for those other immunoassays based on this disclosure. Whereas the precise value of the predetermined cutoff/level may vary between assays, correlations as described herein (if any) may be generally applicable.

[0123] “Pretreatment reagent,” e.g., lysis, precipitation and/or solubilization reagent, as used in a diagnostic assay as described herein is one that lyses any cells and/or solubilizes any analyte that is/are present in a test sample. Pretreatment is not necessary for all samples, as described further herein. Among other things, solubilizing the analyte (e.g., polypeptide of interest) may entail release of the analyte from any endogenous binding proteins present in the sample. A pretreatment reagent may be homogeneous (not requiring a separation step) or heterogeneous (requiring a separation step). With use of a heterogeneous pretreatment reagent there is removal of any precipitated analyte binding proteins from the test sample prior to proceeding to the next step of the assay.

[0124] “Quality control reagents” in the context of immunoassays and kits described herein, include, but are not limited to, calibrators, controls, and sensitivity panels. A “calibrator” or “standard” typically is used (e.g., one or more, such as a plurality) in order to establish calibration (standard) curves for interpolation of the concentration of an analyte, such as an antibody or an analyte. Alternatively, a single calibrator, which is near a predetermined positive/negative cutoff, can be used. Multiple calibrators (i.e., more than one calibrator or a varying amount of calibrator(s)) can be used in conjunction so as to comprise a “sensitivity panel.”

[0125] The terms “specific” and “specificity” in the context of an interaction between members of a specific binding pair (e.g., an antigen (or fragment thereof) and an antibody (or antigenically reactive fragment thereof)) refer to the selective reactivity of the interaction. The phrase “specifically binds to” and analogous phrases refer to the ability of antibodies (or antigenically reactive fragments thereof) to bind specifically to analyte (or a fragment thereof) and not bind specifically to other entities.

[0126] The term “specific binding partner” is a member of a specific binding pair. A specific binding pair comprises two different molecules, which specifically bind to each other through chemical or physical means. Therefore, in addition to antigen and antibody specific binding pairs of common immunoassays, other specific binding pairs can include biotin and avidin (or streptavidin), carbohydrates and lectins, complementary nucleotide sequences, effector and receptor molecules, cofactors and enzymes, enzyme inhibitors and enzymes, and the like. Furthermore, specific binding pairs can include members that are analogs of the original specific binding members, for example, an analyte-analog. Immunoreactive specific binding members include antigens, antigen fragments, and antibodies, including monoclonal and polyclonal antibodies as well as complexes, fragments, and variants (including fragments of variants) thereof, whether isolated or recombinantly produced.

[0127] The term “variant” means a polypeptide that differs from a given polypeptide in amino acid sequence by the addition (e.g., insertion), deletion, or conservative substitution of amino acids, but that retains the biological activity of the given polypeptide (e.g., a variant IL-17 can compete with anti-IL-17 antibody for binding to IL-17). A conservative substitution of an amino acid, i.e., replacing an amino acid with a different amino acid of similar properties (e.g., hydrophilicity and degree and distribution of charged regions) is recognized in the art as typically involving a minor change. These minor changes can be identified, in part, by considering the hydropathic index of amino acids, as understood in the art (see, e.g., Kyte et al. (1982) J. Mol. Biol. 157: 105-132). The hydropathic index of an amino acid is based on a consideration of its hydrophobicity and charge. It is known in the art that amino acids of similar hydropathic indexes can be substituted and still retain protein function. In one aspect, amino acids having hydropathic indexes of ±2 are substituted. The hydrophilicity of amino acids also can be used to reveal substitutions that would result in proteins retaining biological function. A consideration of the hydrophilicity of amino acids in the context of a peptide permits calculation of the greatest local average hydrophilicity of that peptide, a useful measure that has been reported to correlate well with antigenicity and immunogenicity (see, e.g., U.S. Pat. No. 4,554,101). Substitution of amino acids having similar hydrophilicity values can result in peptides retaining biological activity, for example immunogenicity, as is understood in the art. In one aspect, substitutions are performed with amino acids having hydrophilicity values within ±2 of each other. Both the hydrophobicity index and the hydrophilicity value of amino acids are influenced by the particular side chain of that amino acid. Consistent with that observation, amino acid substitutions that are compatible with biological function are understood to depend on the relative similarity of the amino acids, and particularly the side chains of those amino acids, as revealed by the hydrophobicity, hydrophilicity, charge, size, and other properties. “Variant” also can be used to describe a polypeptide or fragment thereof that has been differentially processed, such as by proteolysis, phosphorylation, or other post-translational modification, yet retains its biological activity or antigen reactivity, e.g., the ability to bind to IL-18. Use of “variant” herein is intended to encompass fragments of a variant unless otherwise contradicted by context.

[0128] I) Generation of DVD-Binding Protein

[0129] Dual Variable Domain binding proteins capable of binding TNF and methods of making the same are provided. The binding protein can be generated using various techniques. Expression vectors, host cell and methods of generating the binding protein are provided.

[0130] A) Construction of DVD-Binding Protein Molecules

[0131] The dual variable domain (DVD) binding protein molecule is designed such that two different light chain variable domains (VL) from the two different parent monoclonal antibodies are linked in tandem directly or via a short linker by recombinant DNA techniques, followed by the light chain constant domain. Similarly, the heavy chain comprises two different heavy chain variable domains (VH) linked in tandem, followed by the constant domain CH1 and Fc region (FIG. 1A).

[0132] The variable domains can be obtained using recombinant DNA techniques from a parent antibody generated by any one of the methods described herein. In an embodiment, the variable domain is a murine heavy or light chain variable domain. In another embodiment, the variable domain is a CDR grafted or a humanized variable heavy or light chain domain. In an embodiment, the variable domain is a human heavy or light chain variable domain.

[0133] In one embodiment the first and second variable domains are linked directly to each other using recombinant DNA techniques. In another embodiment the variable domains are linked via a linker sequence. In an embodiment, two variable domains are linked. Three or more variable domains may also be linked directly or via a linker sequence. The variable domains may bind the same antigen or may bind different antigens. In some embodiments, the DVD-binding protein molecules may include one immunoglobulin variable domain and one non-immunoglobulin variable domain such as ligand binding domain of a receptor, active domain of an enzyme. DVD-binding protein molecules may also comprise 2 or more non-Ig domains.

[0134] The linker sequence may be a single amino acid or a polypeptide sequence. In an embodiment, the linker sequences are AKTTPKLEEGEFSEAR (SEQ ID NO: 1); AKTTPKLEEGEFSEARV (SEQ ID NO: 2); AKTTPKLGG (SEQ ID NO: 3); SAKTTPKLGG (SEQ ID NO: 4); SAKTTP (SEQ ID NO: 5); RADAAP (SEQ ID NO: 6); RADAAPTVS (SEQ ID NO: 7); RADAAAAGGPGS (SEQ ID NO: 8); RADAAAA(G₄S)₄ (SEQ ID NO: 9), SAKTTPKLEEGEFSEARV (SEQ ID NO: 10); ADAAP (SEQ ID NO: 11); ADAAPTVSIFPP (SEQ ID NO: 12); TVAAP (SEQ ID NO: 13); TVAAPSVFIFPP (SEQ ID NO: 14); QPKAAP (SEQ ID NO: 15); QPKAAPSVTLFPP (SEQ ID NO: 16); AKTTPP (SEQ ID NO: 17); AKTTPPSVTPLAP (SEQ ID NO: 18); AKTTAP (SEQ ID NO: 19); AKTTAPSVYPLAP (SEQ ID NO: 20); ASTKGP (SEQ ID NO: 21); ASTKGPSVFPLAP (SEQ ID NO: 22), GGGGSGGGGSGGGGS (SEQ ID NO: 23); GENKVEYAPALMALS (SEQ ID NO: 24); GPAKELTPLKEAKVS (SEQ ID NO: 25); GHEAAAVMQVQYPAS (SEQ ID NO: 26); TVAAPSVFIFPPTVAAPSVFIFPP (SEQ ID NO: 27); and ASTKGPSVFPLAPASTKGPSVFPLAP (SEQ ID NO: 28). The choice of linker sequences is based on crystal structure analysis of several Fab molecules. There is a natural flexible linkage between the variable domain and the CH1/CL constant domain in Fab or antibody molecular structure. This natural linkage comprises approximately 10-12 amino acid residues, contributed by 4-6 residues from C-terminus of V domain and 4-6 residues from the N-terminus of CL/CH1 domain. DVD-binding protein Igs were generated using N-terminal 5-6 amino acid residues, or 11-12 amino acid residues, of CL or CH1 as linker in light chain and heavy chain of DVD-binding protein, respectively. The N-terminal residues of CL or CH1 domains, particularly the first 5-6 amino acid residues, adopt a loop conformation without strong secondary structures, therefore can act as flexible linkers between the two variable domains. The N-terminal residues of CL or CH1 domains are natural extension of the variable domains, as they are part of the Ig sequences, therefore minimize to a large extent any immunogenicity potentially arising from the linkers and junctions.

[0135] Other linker sequences may include any sequence of any length of CL/CH1 domain but not all residues of CL/CH1 domain; for example the first 5-12 amino acid residues of the CL/CH1 domains; the light chain linkers can be from Cκ or Cλ; and the heavy chain linkers can be derived from CH1 of any isotypes, including Cγ1, Cγ2, Cγ3, Cγ4, Cα1, Cα2, Cδ, Cε, and Cμ. Linker sequences may also be derived from other proteins such as Ig-like proteins, (e.g., TCR, FcR, KIR); G/S based sequences (e.g., G4S repeats; SEQ ID NO: 29); hinge region-derived sequences; and other natural sequences from other proteins.

[0136] In an embodiment a constant domain is linked to the two linked variable domains using recombinant DNA techniques. In an embodiment, sequence comprising linked heavy chain variable domains is linked to a heavy chain constant domain and sequence comprising linked light chain variable domains is linked to a light chain constant domain. In an embodiment, the constant domains are human heavy chain constant domain and human light chain constant domain respectively. In an embodiment, the DVD heavy chain is further linked to an Fc region. The Fc region may be a native sequence Fc region, or a variant Fc region. In another embodiment, the Fc region is a human Fc region. In another embodiment the Fc region includes Fc region from IgG1, IgG2, IgG3, IgG4, IgA, IgM, IgE, or IgD.

[0137] In another embodiment two heavy chain DVD polypeptides and two light chain DVD polypeptides are combined to form a DVD-binding protein molecule. Table 1 lists amino acid sequences of VH and VL regions of exemplary antibodies for targets useful for treating disease, e.g., for treating cancer. In an embodiment, a DVD comprising at least two of the VH and/or VL regions listed in Table 1, in any orientation is provided. In some embodiments, VD1 and VD2 are independently chosen. Therefore, in some embodiments, VD1 and VD2 comprise the same SEQ ID NO and, in other embodiments, VD1 and VD2 comprise different SEQ ID NOS. The VH and VL domain sequences provided below comprise complementary determining region (CDR) and framework sequences that are either known in the art or readily discernable using methods known in the art. In some embodiments, one or more of these CDR and/or framework sequences are replaced, without loss of function, by other CDR and/or framework sequences from binding proteins that are known in the art to bind to the same antigen.

TABLE 1
List of Amino Acid Sequences of VH and VL regions of Antibodies for
Generating DVD-binding proteins
Three different anti-IL-17 variants are shown in Table 1A (seq. 1,
seq. 2, and seq. 3)
Table 1A. Certain VH and VL Regions that Bind IL-17

| | ABT | | |
|---|---|---|---|
| SEQ ID | Unique | | Sequence |
| No. | ID | Protein region | 1234567890123456789012345678901234567890 |
| 30 | AB273VH | VH-IL17 (seq. 1) | EVQLVQSGAEVKKPGSSVKVSCKASGYTFTDYEIHWVRQA |
| | | | PGQGLEWMGVNDPESGGTFYNQKFDGRVTLTADESTSTAY |
| | | | MELSSLRSEDTAVYYCTRYSKWDSFDGMDYWGQGTTVTVS |
| | | | S |
| 31 | AB273VL | VL-IL17 (seq. 1) | DIQMTQSPSSLSASVGDRVTITCRASSGIISYIDWFQQKP |
| | | | GKAPKRLIYATFDLASGVPSRFSGSGSGTDYTLTISSLQP |
| | | | EDFATYYCRQVGSYPETFGQGTKLEIKR |
| 32 | AB274VH | VH-IL17 (seq. 2) | EVQLVQSGAEVKKPGSSVKVSCKASGGSFGGYGIGWVRQA |
| | | | PGQGLEWMGGITPFFGFADYAQKFQGRVTITADESTTTAY |
| | | | MELSGLTSDDTAVYYCARDPNEFWNGYYSTHDFDSWGQGT |
| | | | TVTVSS |
| 33 | AB274VL | VL-IL17 (seq. 2) | EIVLTQSPDFQSVTPKEKVTITCRASQDIGSELHWYQQKP |
| | | | DQPPKLLIKYASHSTSGVPSRFSGSGSGTDFTLTINGLEA |
| | | | EDAGTYYCHQTDSLPYTFGPGTKVDIKR |
| 34 | AB275VH | VH-IL17 (seq. 3) | EVQLVQSGAEVKKPGESVKISCKASGGSFRSYGISWVRQA |
| | | | PGQGLEWMGGITHFFGITDYAQKFQGRVTITADESTTTAY |
| | | | MELSGLTSDDTAVYYCAREPNDFWNGYYDTHDFDSWGQGT |
| | | | TVTVSS |
| 35 | AB275VL | VL-IL17 (seq. 3) | EIVLTQSPDFQSVTPKEKVTITCRASQNIGSELHWYQQKP |
| | | | DQSPKLLIKYASHSISGVPSRFSGSGSGTDFTLTINGLEA |
| | | | EDAATYYCHQSDTLPHTFGQGTKVDIKR |

[0138] Tables 1B and 1C provide the VH and VL sequences of fully human anti-human TNF monoclonal antibodies isolated by in vitro display technologies from human antibody libraries by their ability to bind recombinant human TNF proteins.

TABLE 1B
Individual Fully Human Anti-TNF-α VH Sequences

| | | | Sequence |
|---|---|---|---|
| Protein region | | SEQ ID NO | 123456789012345678901234567890 |
| AE11-1 VH | | SEQ ID | EVQLVQSGAEVKKPGASVKVSCKASGYTFT |
| | | NO.: 36 | SYDVNWVRQATGQGLEWMGWMNPNSGNTGY |
| | | | AQKFQGRVTITADESTSTAYMELSSLRSED |
| | | | TAVYYCAIFDSDYMDVWGKGTLVTVSS |
| AE11-1 VH | CDR- | Residues 31-35 | SYDVN |
| | H1 | of SEQ ID | |
| | | NO.: 36 | |
| AE11-1 VH | CDR- | Residues 50-66 | WMNPNSGNTGYAQKFQG |
| | H2 | of SEQ ID | |
| | | NO.: 36 | |
| AE11-1 VH | CDR- | Residues 99-106 | FDSDYMDV |
| | H3 | of SEQ | |
| | | ID NO.: 36 | |
| AE11-5 VH | | SEQ ID | EVQLVQSGAEVKKPGSSAKVSCKASGGTFS |
| | | NO.: 37 | SYAISWVRQAPGQGLEWMGGIIPILGTANY |
| | | | AQKFLGRVTITADESTSTVYMELSSLRSED |
| | | | TAVYYCARGLYYDPTRADYWGQGTLVTVSS |
| AE11-5 VH | CDR- | Residues 31-35 | SYAIS |
| | H1 | of SEQ ID | |
| | | NO.: 37 | |
| AE11-5 VH | CDR- | Residues 50-66 | GIIPILGTANYAQKFLG |
| | H2 | of SEQ ID | |
| | | NO.: 37 | |
| AE11-5 VH | CDR- | Residues 99-109 | GLYYDPTRADY |
| | H3 | of SEQ | |
| | | ID NO.: 37 | |
| TNF-JK1 VH | | SEQ ID | EVQLVESGGGLVQPGGSLRLSCATSGFTFN |
| | | NO.: 38 | NYWMSWVRQAPGKGLEWVANINHDESEKYY |
| | | | VDSAKGRFTISRDNAEKSLFLQMNSLRAED |
| | | | TAVYYCARIIRGRVGFDYYNYAMDVWGQGT |
| | | | LVTVSS |
| TNF-JK1 VH | CDR- | Residues 31-35 | NYWMS |
| | H1 | of SEQ ID | |
| | | NO.: 38 | |
| TNF-JK1 VH | CDR- | Residues 50-66 | NINHDESEKYYVDSAKG |
| | H2 | of SEQ ID | |
| | | NO.: 38 | |
| TNF-JK1 VH | CDR- | Residues 99-115 | IIRGRVGFDYYNYAMDV |
| | H3 | of SEQ | |
| | | ID NO.: 38 | |
| TNF-JK1 VL | CDR- | Residues 89-95 | QESYSLI |
| | L3 | of SEQ | |
| | | ID NO.: 38 | |
| TNF-Y7C VH | | SEQ ID | EVQLVQSGAEVKKPGASVKVSCKTSGYTFS |
| | | NO.: 39 | NYDINWVRQPTGQGLEWMGWMDPNNGNTGY |
| | | | AQKFVGRVTMTRDTSKTTAYLELSGLKSED |
| | | | TAVYYCARSSGSGGTWYKEYFQSWGQGTMV |
| | | | TVSS |
| TNF-Y7C VH | CDR- | Residues 31-35 | NYDIN |
| | H1 | of SEQ ID | |
| | | NO.: 39 | |
| TNF-Y7C VH | CDR- | Residues 50-66 | WMDPNNGNTGYAQKFVG |
| | H2 | of SEQ ID | |
| | | NO.: 39 | |
| TNF-Y7C VH | CDR- | Residues 99-112 | KSSGSGGTWYKEYFQS |
| | H3 | of SEQ | |
| | | ID NO.: 39 | |
| AE11-7 VH | | SEQ ID | EVQLVQSGAEVKKPGASVKVSCKTSGYSLT |
| | | NO.: 40 | QYPIHWVRQAPGQRPEWMGWISPGNGNTKL |
| | | | SPKFQGRVTLSRDASAGTVFMDLSGLTSDD |
| | | | TAVYFCTSVDLGDHWGQGTLVTVSS |
| AE11-7 VH | CDR- | Residues 31-35 | QYPIH |
| | H1 | of SEQ ID | |
| | | NO.: 40 | |
| AE11-7 VH | CDR- | Residues 50-66 | WISPGNGNTKLSPKFQG |
| | H2 | of SEQ ID | |
| | | NO.: 40 | |
| AE11-7 VH | CDR- | Residues 99-104 | VDLGDH |
| | H3 | of SEQ | |
| | | ID NO.: 40 | |
| AE11-13 VH | | SEQ ID | EVQLVESGGGLVQPGRSLRLSCAASGFTFD |
| | | NO.: 41 | DYPMHWVRQAPGEGLEWVSGISSNSASIGY |
| | | | ADSVKGRFTISRDNAQNTLYLQMNSLGDED |
| | | | TAVYYCVSLTLGIGQGTLVTVSS |
| AE11-13 VH | CDR- | Residues 31-35 | DYPMH |
| | H1 | of SEQ ID | |
| | | NO.: 41 | |
| AE11-13 VH | CDR- | Residues 50-66 | GISSNSASIGYADSVKG |
| | H2 | of SEQ ID | |
| | | NO.: 41 | |
| AE11-13 VH | CDR- | Residues 99-102 | LTLG |
| | H3 | of SEQ | |
| | | ID NO.: 41 | |

TABLE 1C
Individual Fully Human anti-TNF-α VL Sequences

| | | | Sequence |
|---|---|---|---|
| Protein region | | SEQ ID NO. | 123456789012345678901234567890 |
| AE11-1 VL | | SEQ ID | SYELTQPPSVSLSPGQTARITCSGDALPKQ |
| | | NO.: 42 | YAYWYQQKPGQAPVLVIYKDTERPSGIPER |
| | | | FSGSSSGTTVTLTISGAQAEDEADYYCQSA |
| | | | DSSGTSWVFGGGTKLTVL |
| AE11-1 VL | CDR- | Residues 23-33 | SGDALPKQYAY |
| | L1 | of SEQ ID | |
| | | NO.: 42 | |
| AE11-1 VL | CDR- | Residues 49-55 | KDTERPS |
| | L2 | of SEQ ID | |
| | | NO.: 42 | |
| AE11-1 VL | CDR- | Residues 89-98 | SADSSGTSWV |
| | L3 | of SEQ | |
| | | ID NO.: 42 | |
| AE11-5 VL | | SEQ ID | DIVMTQSPDFHSVTPKEKVTITCRASQSIG |
| | | NO.: 43 | SSLHWYQQKPDQSPKLLIRHASQSISGVPS |
| | | | RFSGSGSGTDFTLTIHSLEAEDAATYYCHQ |
| | | | SSSSPPPTFGQGTQVEIK |
| AE11-5 VL | CDR- | Residues 24-34 | RASQSIGSSLH |
| | L1 | of SEQ ID | |
| | | NO.: 43 | |
| AE11-5 VL | CDR- | Residues 50-56 | HASQSIS |
| | L2 | of SEQ ID | |
| | | NO.: 43 | |
| AE11-5 VL | CDR- | Residues 89-98 | HQSSSSPPPT |
| | L3 | of SEQ | |
| | | ID NO.: 43 | |
| TNF-JK1 VL | | SEQ ID | DIRLTQSPSPLSASVGDRVTITCRASQSIG |
| | | NO.: 44 | NYLNWYQHKPGKAPKLLIYAASSLQSGVPS |
| | | | RFSGTGSGTDFTLTISSLQPEDFATYYCQE |
| | | | SYSLIFAGGTKVEIK |
| INF-JK1 VL | CDR- | Residues 24-34 | RASQSIGNYLN |
| | L1 | of SEQ ID | |
| | | NO.: 44 | |
| INF-JK1 VL | CDR- | Residues 50-56 | AASSLQS |
| | L2 | of SEQ ID | |
| | | NO.: 44 | |
| TNF-JK1 VL | CDR- | Residues 89-95 | QESYSLI |
| | L3 | of SEQ | |
| | | ID NO.: 44 | |
| TNF-Y7C VL | | SEQ ID | DIVMTQSPLSLPVTPGEPASISCRSSQSLL |
| | | NO.: 45 | HSNGYNYLDWYLQKPGQFPQLLIYLGSYRA |
| | | | SGVPDRFSGSGSGTDFTLKISRVEAEDVGV |
| | | | YYCMQRIEFPPGTEGQGTELGIK |
| TNF-Y7C VL | CDR- | Residues 24-39 | RSSQSLLHSNGYNYLD |
| | L1 | of SEQ ID | |
| | | NO.: 45 | |
| TNF-Y7C VL | CDR- | Residues 55-61 | LGSYRAS |
| | L2 | of SEQ ID | |
| | | NO.: 45 | |
| TNF-Y7C VL | CDR- | Residues 94-103 | MQRIEFPPGT |
| | L3 | of SEQ | |
| | | ID NO.: 45 | |
| AE11-7 VL | | SEQ ID | DIVMTQSPEFQSVTPKEKVTITCRASQSIG |
| | | NO.: 46 | SSLHWYQQKPDQSPKLLINYASQSFSGVPS |
| | | | RFSGGGSGTDFTLTINSLEAEDAATYYCHQ |
| | | | SSNLPITFGQGTRLEIK |
| AE11-7 VL | CDR- | Residues 24-34 | RASQSIGSSLH |
| | L1 | of SEQ ID | |
| | | NO.: 46 | |
| AE11-7 VL | CDR- | Residues 50-56 | YASQSFS |
| | L2 | of SEQ ID | |
| | | NO.: 46 | |
| AE11-7 VL | CDR- | Residues 89-97 | HQSSNLPIT |
| | L3 | of SEQ | |
| | | ID NO.: 46 | |
| AE11-13 VL | | SEQ ID | DIRLTQSPSSLSASVGDRVTITCRASQSIG |
| | | NO.: 47 | NYLHWYQQKPGKAPKLLIYAASSLQSGVPS |
| | | | RFSGSGSGTDFTLTISSLQPEDFATYYCQQ |
| | | | SYSTLYSFGQGTKLEIK |
| AE11-13 VL | CDR- | Residues 24-34 | RASQSIGNYLH |
| | L1 | of SEQ ID | |
| | | NO.: 47 | |
| AE11-13 VL | CDR- | Residues 50-56 | AASSLQS |
| | L2 | of SEQ ID | |
| | | NO.: 47 | |
| AE11-13 VL | CDR- | Residues 89-97 | QQSYSTLYS |
| | L3 | of SEQ | |
| | | ID NO.: 47 | |

[0139] Tables 1D and 1E below provide a list of humanized ant-TNF MAK-195 antibodies that were converted into IgG proteins for characterization, both VH and VL sequences.

TABLE 1D
Humanized Anti-TNF MAK-195 Ab VH sequences of IgG
converted clones

| Protein | | | |
|---|---|---|---|
| region | | Sequence | 123456789012345678901234567890 |
| A8 | | SEQ ID | EVQLVESGGGLVQPGGSLRLSCAASGFTFS |
| VH | | NO.: 48 | NYGVNWVRQAPGKGLEWVSMIAADGFTDYA |
| | | | SSVKGRFTISRDNSKNTLYLQMNSLRAEDT |
| | | | AVYYCAREWHHGPVAYWGQGTLVTVSS |
| A8 | CDR-H1 | Residues 31-35 | NYGVN |
| VH | | of SEQ ID | |
| | | NO.: 48 | |
| A8 | CDR- | Residues 50-65 | MIAADGFTDYASSVKG |
| VH | H2 | of SEQ ID | |
| | | NO.: 48 | |
| A8 | CDR- | Residues 98-106 | EWHHGPVAY |
| VH | H3 | of SEQ | |
| | | ID NO.: 48 | |
| B5 | | SEQ ID | EVQLVESGGGLVQPGGSLRLSCAASGFTFS |
| VH | | NO.: 49 | NYGVSWVRQAPGKGLEWVSLIRGDGSTDYA |
| | | | SSLKGRFTISRDNSKNTLYLQMNSLRAEDT |
| | | | AVYYCAREWHHGPVAYWGQGTLVTVSS |
| B5 | CDR- | Residues 31-35 | NYGVS |
| VH | H1 | of SEQ ID | |
| | | NO.: 49 | |
| B5 | CDR- | Residues 50-65 | LIRGDGSTDYASSLKG |
| VH | H2 | of SEQ ID | |
| | | NO.: 49 | |
| B5 | CDR- | Residues 98-106 | EWHHGPVAY |
| VH | H3 | of SEQ | |
| | | ID NO.: 49 | |
| rHC44 | | SEQ ID | EVQLVESGGGLVQPGGSLRLSCAASGFTFS |
| VH | | NO.: 50 | NYGVSWVRQAPGKGLEWVSMIWADGSTHYA |
| | | | DTLKSRFTISRDNSKNTLYLQMNSLRAEDT |
| | | | AVYYCAREWQHGPVAYWGQGTLVTVSS |
| rHC44 | CDR- | Residues 31-35 | NYGVS |
| VH | H1 | of SEQ ID | |
| | | NO.: 50 | |
| rHC44 | CDR- | Residues 50-65 | MIWADGSTHYADTLKS |
| VH | H2 | of SEQ ID | |
| | | NO.: 50 | |
| rHC44 | CDR- | Residues 98-106 | EWQHGPVAY |
| VH | H3 | of SEQ | |
| | | ID NO.: 50 | |
| rHC22 | | SEQ ID | EVQLVESGGGLVQPGGSLRLSCAASGFTFS |
| VH | | NO.: 51 | NYGVTWVRQAPGKGLEWVSMIWADGSTDYA |
| | | | DTVKGRFTISRDNSKNTLYLQMNSLRAEDT |
| | | | AVYYCAREWQHGPVAYWGQGTLVTVSS |
| rHC22 | CDR- | Residues 31-35 | NYGVT |
| VH | H1 | of SEQ ID | |
| | | NO.: 51 | |
| rHC22 | CDR- | Residues 50-65 | MIWADGSTDYADTVKG |
| VH | H2 | of SEQ ID | |
| | | NO.: 51 | |
| rHC22 | CDR- | Residues 98-106 | EWQHGPVAY |
| VH | H3 | of SEQ | |
| | | ID NO.: 51 | |
| rHC81 | | SEQ ID | EVQLVESGGGLVQPGGSLRLSCAASGFTFS |
| VH | | NO.: 52 | NYGVTWVRQAPGKGLEWVSMIWADGSTHYA |
| | | | DSVKSRFTISRDNSKNTLYLQMNSLRAEDT |
| | | | AVYYCAREWQHGPLAYWGQGTLVTVSS |
| rHC81 | CDR- | Residues 31-35 | NYGVT |
| VH | H1 | of SEQ ID | |
| | | NO.: 52 | |
| rHC81 | CDR- | Residues 50-65 | MIWADGSTHYADSVKS |
| VH | H2 | of SEQ ID | |
| | | NO.: 52 | |
| rHC81 | CDR- | Residues 98-106 | EWQHGPLAY |
| VH | H3 | of SEQ | |
| | | ID NO.: 52 | |
| rHC18 | | SEQ ID | EVQLVESGGGLVQPGGSLRLSCAASGFTFS |
| VH | | NO.: 53 | NYGVTWVRQAPGKGLEWVSMIWSDGSTDYA |
| | | | SSVKGRFTISRDNSKNTLYLQMNSLRAEDT |
| | | | AVYYCAREWQHGPVAYWGQGTLVTVSS |
| rHC18 | CDR- | Residues 31-35 | NYGVT |
| VH | H1 | of SEQ ID | |
| | | NO.: 53 | |
| rHC18 | CDR- | Residues 50-65 | MIWSDGSTDYASSVKG |
| VH | H2 | of SEQ ID | |
| | | NO.: 53 | |
| rHC18 | CDR- | Residues 98-106 | EWQHGPVAY |
| VH | H3 | of SEQ | |
| | | ID NO.: 53 | |
| rHC14 | | SEQ ID | EVQLVESGGGLVQPGGSLRLSCAASGFTFS |
| VH | | NO.: 54 | NYGVTWVRQAPGKGLEWVSMIWADGSTHYA |
| | | | SSLKGRFTISRDNSKNTLYLQMNSLRAEDT |
| | | | AVYYCAREWQHGPAAYWGQGTLVTVSS |
| rHC14 | CDR- | Residues 31-35 | NYGVT |
| VH | H1 | of SEQ ID | |
| | | NO.: 54 | |
| rHC14 | CDR- | Residues 50-65 | MIWADGSTHYASSLKG |
| VH | H2 | of SEQ ID | |
| | | NO.: 54 | |
| rHC14 | CDR- | Residues 98-106 | EWQHGPAAY |
| VH | H3 | of SEQ | |
| | | ID NO.: 54 | |
| rHC3 | | SEQ ID | EVQLVESGGGLVQPGGSLRLSCAASGFTFS |
| VH | | NO.: 55 | NYGVSWVRQAPGKGLEWVSMIWADGSTHYA |
| | | | SSLKGRFTISRDNSKNTLYLQMNSLRAEDT |
| | | | AVYYCAREWQHGPVAYWGQGTLVTVSS |
| rHC3 | CDR- | Residues 31-35 | NYGVS |
| VH | H1 | of SEQ ID | |
| | | NO.: 55 | |
| rHC3 | CDR- | Residues 50-65 | MIWADGSTHYASSLKG |
| VH | H2 | of SEQ ID | |
| | | NO.: 55 | |
| rHC3 | CDR- | Residues 98-106 | EWQHGPVAY |
| VH | H3 | of SEQ | |
| | | ID NO.: 55 | |
| rHC19 | | SEQ ID | EVQLVESGGGLVQPGGSLRLSCAASGFTFS |
| VH | | NO.: 56 | NYGVTWVRQAPGKGLEWVSMIWADGSTHYA |
| | | | SSVKGRFTISRDNSKNTLYLQMNSLRAEDT |
| | | | AVYYCAREWQHGPAAYWGQGTLVTVSS |
| rHC19 | CDR- | Residues 31-35 | NYGVT |
| VH | H1 | of SEQ ID | |
| | | NO.: 56 | |
| rHC19 | CDR- | Residues 50-65 | MIWADGSTHYASSVKG |
| VH | H2 | of SEQ ID | |
| | | NO.: 56 | |
| rHC19 | CDR- | Residues 98-106 | EWQHGPAAY |
| VH | H3 | of SEQ | |
| | | ID NO.: 56 | |
| rHC34 | | SEQ ID | EVQLVESGGGLVQPGGSLRLSCAASGFTFS |
| VH | | NO.: 57 | NYGVTWVRQAPGKGLEWVSMIWADGSTHYA |
| | | | SSVKGRFTISRDNSKNTLYLQMNSLRAEDT |
| | | | AVYYCAREWQHGPSAYWGQGTLVTVSS |
| rHC34 | CDR- | Residues 31-35 | NYGVT |
| VH | H1 | of SEQ ID | |
| | | NO.: 57 | |
| rHC34 | CDR- | Residues 50-65 | MIWADGSTHYASSVKG |
| VH | H2 | of SEQ ID | |
| | | NO.: 57 | |
| rHC34 | CDR- | Residues 98-106 | EWQHGPSAY |
| VH | H3 | of SEQ | |
| | | ID NO.: 57 | |
| rHC83 | | SEQ ID | EVQLVESGGGLVQPGGSLRLSCAASGFTFS |
| VH | | NO.: 58 | NYGVTWVRQAPGKGLEWVSMIWADGSTHYA |
| | | | SSVKGRFTISRDNSKNTLYLQMNSLRAEDT |
| | | | AVYYCAREWQHGPVAYWGQGTLVTVSS |
| rHC83 | CDR- | Residues 31-35 | NYGVT |
| VH | H1 | of SEQ ID | |
| | | NO.: 58 | |
| rHC83 | CDR- | Residues 50-65 | MIWADGSTHYASSVKG |
| VH | H2 | of SEQ ID | |
| | | NO.: 58 | |
| rHC83 | CDR- | Residues 98-106 | EWQHGPVAY |
| VH | H3 | of SEQ | |
| | | ID NO.: 58 | |
| S4-19 | | SEQ ID | EVQLVESGGGLVQPGGSLRLSCAASGFTFS |
| VH | | NO.: 59 | NYGVEWVRQAPGKGLEWVSGIWADGSTHYA |
| | | | DTVKSRFTISRDNSKNTLYLQMNSLRAEDT |
| | | | AVYYCAREWQHGPVAYWGQGTLVTVSS |
| S4-19 | CDR- | Residues 31-35 | NYGVE |
| VH | H1 | of SEQ ID | |
| | | NO.: 59 | |
| S4-19 | CDR- | Residues 50-65 | GIWADGSTHYADTVKS |
| VH | H2 | of SEQ ID | |
| | | NO.: 59 | |
| S4-19 | CDR- | Residues 98-106 | EWQHGPVAY |
| VH | H3 | of SEQ | |
| | | ID NO.: 59 | |
| S4-50 | | SEQ ID | EVQLVESGGGLVQPGGSLRLSCAASGFTFS |
| VH | | NO.: 60 | NYGVEWVRQAPGKGLEWVSGIWADGSTHYA |
| | | | DTVKSRFTISRDNSKNTLYLQMNSLRAEDT |
| | | | AVYYCAREWQHGPVGYWGQGTLVTVSS |
| S4-50 | CDR- | Residues 31-35 | NYGVE |
| VH | H1 | of SEQ ID | |
| | | NO.: 60 | |
| S4-50 | CDR- | Residues 50-65 | GIWADGSTHYADTVKS |
| VH | H2 | of SEQ ID | |
| | | NO.: 60 | |
| S4-50 | CDR- | Residues 98-106 | EWQHGPVGY |
| VH | H3 | of SEQ | |
| | | ID NO.: 60 | |
| S4-63 | | SEQ ID | EVQLVESGGGLVQPGGSLRLSCAASGFTFS |
| VH | | NO.: 61 | NYGVEWVRQAPGKGLEWVSGIWADGSTHYA |
| | | | DTVKSRFTISRDNSKNTLYLQMNSLRAEDT |
| | | | AVYYCAREWQHGPVGYWGQGTLVTVSS |
| S4-63 | CDR- | Residues 31-35 | NYGVE |
| VH | H1 | of SEQ ID | |
| | | NO.: 61 | |
| S4-63 | CDR- | Residues 50-65 | GIWADGSTHYADTVKS |
| VH | H2 | of SEQ ID | |
| | | NO.: 61 | |
| S4-63 | CDR- | Residues 98-106 | EWQHGPVGY |
| VH | H3 | of SEQ | |
| | | ID NO.: 61 | |
| S4-55 | | SEQ ID | EVQLVESGGGLVQPGGSLRLSCAASGFTFS |
| VH | | NO.: 62 | NYGVTWVRQAPGKGLEWVSMIWADGSTDYA |
| | | | STVKGRFTISRDNSKNTLYLQMNSLRAEDT |
| | | | AVYYCAREWQHGPVGYWGQGTLVTVSS |
| S4-55 | CDR- | Residues 31-35 | NYGVT |
| VH | H1 | of SEQ ID | |
| | | NO.: 62 | |
| S4-55 | CDR- | Residues 50-65 | MIWADGSTDYASTVKG |
| VH | H2 | of SEQ ID | |
| | | NO.: 62 | |
| S4-55 | CDR- | Residues 98-106 | EWQHGPVGY |
| VH | H3 | of SEQ | |
| | | ID NO.: 62 | |
| S4-6 | | SEQ ID | EVQLVESGGGLVQPGGSLRLSCAASGFTFS |
| VH | | NO.: 63 | NYGVTWVRQAPGKGLEWVSMIWADGSTHYA |
| | | | SSVKGRFTISRDNSKNTLYLQMNSLRAEDT |
| | | | AVYYCAREWQHGPVAYWGQGTLVTVSS |
| S4-6 | CDR- | Residues 31-35 | NYGVT |
| VH | H1 | of SEQ ID | |
| | | NO.: 63 | |
| S4-6 | CDR- | Residues 50-65 | MIWADGSTHYASSVKG |
| VH | H2 | of SEQ ID | |
| | | NO.: 63 | |
| S4-6 | CDR- | Residues 98-106 | EWQHGPVAY |
| VH | H3 | of SEQ | |
| | | ID NO.: 63 | |
| S4-18 | | SEQ ID | EVQLVESGGGLVQPGGSLRLSCAASGFTFS |
| VH | | NO.: 64 | NYGVTWVRQAPGKGLEWVSMIWADGSTHYA |
| | | | DSVKSRFTISRDNSKNTLYLQMNSLRAEDT |
| | | | AVYYCAREWQHGPLAYWGQGTLVTVSS |
| S4-18 | CDR- | Residues 31-35 | NYGVT |
| VH | H1 | of SEQ ID | |
| | | NO.: 64 | |
| S4-18 | CDR- | Residues 50-65 | MIWADGSTHYADSVKS |
| VH | H2 | of SEQ ID | |
| | | NO.: 64 | |
| S4-18 | CDR- | Residues 98-106 | EWQHGPLAY |
| VH | H3 | of SEQ | |
| | | ID NO.: 64 | |
| S4-31 | | SEQ ID | EVQLVESGGGLVQPGGSLRLSCAASGFTFS |
| VH | | NO.: 65 | NYGVQWVRQAPGKGLEWVSGIGADGSTAYA |
| | | | SSLKGRFTISRDNSKNTLYLQMNSLRAEDT |
| | | | AVYYCAREWQHSGLAYWGQGTLVTVSS |
| S4-31 | CDR- | Residues 31-35 | NYGVQ |
| VH | H1 | of SEQ ID | |
| | | NO.: 65 | |
| S4-31 | CDR- | Residues 50-65 | GIGADGSTAYASSLKG |
| VH | H2 | of SEQ ID | |
| | | NO.: 65 | |
| S4-31 | CDR- | Residues 98-106 | EWQHSGLAY |
| VH | H3 | of SEQ | |
| | | ID NO.: 65 | |
| S4-34 | | SEQ ID | EVQLVESGGGLVQPGGSLRLSCAASGFTFS |
| VH | | NO.: 66 | NYGVSWVRQAPGKGLEWVSMIWADGSTHYA |
| | | | DTVKGRFTISRDNSKNTLYLQMNSLRAEDT |
| | | | AVYYCAREWQHGPLAYWGQGTLVTVSS |
| S4-34 | CDR- | Residues 31-35 | NYGVS |
| VH | H1 | of SEQ ID | |
| | | NO.: 66 | |
| S4-34 | CDR- | Residues 50-65 | MIWADGSTHYADTVKG |
| VH | H2 | of SEQ ID | |
| | | NO.: 66 | |
| S4-34 | CDR- | Residues 98-106 | EWQHGPLAY |
| VH | H3 | of SEQ | |
| | | ID NO.: 66 | |
| S4-74 | | SEQ ID | EVQLVESGGGLVQPGGSLRLSCAASGFTFS |
| VH | | NO.: 67 | NYGVTWVRQAPGKGLEWVSMIWADGSTHYA |
| | | | DTVKGRFTISRDNSKNTLYLQMNSLRAEDT |
| | | | AVYYCAREWQHGPLAYWGQGTLVTVSS |
| S4-74 | CDR- | Residues 31-35 | NYGVT |
| VH | H1 | of SEQ ID | |
| | | NO.: 67 | |
| S4-74 | CDR- | Residues 50-65 | MIWADGSTHYADTVKG |
| VH | H2 | of SEQ ID | |
| | | NO.: 67 | |
| S4-74 | CDR- | Residues 98-106 | EWQHGPLAY |
| VH | H3 | of SEQ | |
| | | ID NO.: 67 | |
| S4-12 | | SEQ ID | EVQLVESGGGLVQPGGSLRLSCAASGFTFS |
| VH | | NO.: 68 | NYGVTWVRQAPGKGLEWVSMIWADGSTHYA |
| | | | SSVKGRFTISRDNSKNTLYLQMNSLRAEDT |
| | | | AVYYCAREWQHGPVAYWGQGTLVTVSS |
| S4-12 | CDR- | Residues 31-35 | NYGVT |
| VH | H1 | of SEQ ID | |
| | | NO.: 68 | |
| S4-12 | CDR- | Residues 50-65 | MIWADGSTHYASSVKG |
| VH | H2 | of SEQ ID | |
| | | NO.: 68 | |
| S4-12 | CDR- | Residues 98-106 | EWQHGPVAY |
| VH | H3 | of SEQ | |
| | | ID NO.: 68 | |
| S4-54 | | SEQ ID | EVQLVESGGGLVQPGGSLRLSCAASGFTFS |
| VH | | NO.: 69 | NYGVTWVRQAPGKGLEWVSMIWADGSTHYA |
| | | | SSVKGRFTISRDNSKNTLYLQMNSLRAEDT |
| | | | AVYYCAREWQHGPVAYWGQGTLVTVSS |
| S4-54 | CDR- | Residues 31-35 | NYGVT |
| VH | H1 | of SEQ ID | |
| | | NO.: 69 | |
| S4-54 | CDR- | Residues 50-65 | MIWADGSTHYASSVKG |
| VH | H2 | of SEQ ID | |
| | | NO.: 69 | |
| S4-54 | CDR- | Residues 98-106 | EWQHGPVAY |
| VH | H3 | of SEQ | |
| | | ID NO.: 69 | |
| S4-17 | | SEQ ID | EVQLVESGGGLVQPGGSLRLSCAASGFTFS |
| VH | | NO.: 70 | NYGVTWVRQAPGKGLEWVSMIWADGSTHYA |
| | | | SSVKGRFTISRDNSKNTLYLQMNSLRAEDT |
| | | | AVYYCAREWQHGPVAYWGQGTLVTVSS |
| S4-17 | CDR- | Residues 31-35 | NYGVT |
| VH | H1 | of SEQ ID | |
| | | NO.: 70 | |
| S4-17 | CDR- | Residues 50-65 | MIWADGSTHYASSVKG |
| VH | H2 | of SEQ ID | |
| | | NO.: 70 | |
| S4-17 | CDR- | Residues 98-106 | EWQHGPVAY |
| VH | H3 | of SEQ | |
| | | ID NO.: 70 | |
| S4-40 | | SEQ ID | EVQLVESGGGLVQPGGSLRLSCAASGFTFS |
| VH | | NO.: 71 | NYGVTWVRQAPGKGLEWVSMIWADGSTHYA |
| | | | SSVKGRFTISRDNSKNTLYLQMNSLRAEDT |
| | | | AVYYCAREWQHGPVAYWGQGTLVTVSS |
| S4-40 | CDR- | Residues 31-35 | NYGVT |
| VH | H1 | of SEQ ID | |
| | | NO.: 71 | |
| S4-40 | CDR- | Residues 50-65 | MIWADGSTHYASSVKG |
| VH | H2 | of SEQ ID | |
| | | NO.: 71 | |
| S4-40 | CDR- | Residues 98-106 | EWQHGPVAY |
| VH | H3 | of SEQ | |
| | | ID NO.: 71 | |
| S4-24 | | SEQ ID | EVQLVESGGGLVQPGGSLRLSCAASGFTFS |
| VH | | NO.: 72 | NYGVTWVRQAPGKGLEWVSMIWADGSTHYA |
| | | | SSVKGRFTISRDNSKNTLYLQMNSLRAEDT |
| | | | AVYYCAREWQHGPVAYWGQGTLVTVSS |
| S4-24 | CDR- | Residues 31-35 | NYGVT |
| VH | H1 | of SEQ ID | |
| | | NO.: 72 | |
| S4-24 | CDR- | Residues 50-65 | MIWADGSTHYASSVKG |
| VH | H2 | of SEQ ID | |
| | | NO.: 72 | |
| S4-24 | CDR- | Residues 98-106 | EWQHGPVAY |
| VH | H3 | of SEQ | |
| | | ID NO.: 72 | |

TABLE 1E
Humanized Anti-TNF MAK-195 Ab VL sequences
of IgG converted clones

| | | | Sequence |
|---|---|---|---|
| Protein region | | SEQ ID NO. | 123456789012345678901234567890 |
| hMAK195 | | SEQ ID | DIQMTQSPSSLSASVGDRVTITCKASQAVS |
| VL.1 | | NO.: 73 | SAVAWYQQKPGKAPKLLIYWASTRHTGVPS |
| VL | | | RFSGSGSGTDFTLTISSLQPEDFATYYCQQ |
| | | | HYSTPFTFGQGTKLEIKR |
| hMAK195 | CDR-L1 | Residues 24-34 | KASQAVSSAVA |
| VL.1 | | of SEQ ID | |
| VL | | NO.: 73 | |
| hMAK195 | CDR-L2 | Residues 50-56 | WASTRHT |
| VL.1 | | of SEQ ID | |
| VL | | NO.: 73 | |
| hMAK195 | CDR- | Residues 89-97 | QQHYSTPFT |
| VL.1 | L3 | of SEQ | |
| VL | | ID NO.: 73 | |
| S4-24 | | SEQ ID | DIQMTQSPSSLSASVGDRVTITCRASQLVS |
| VL | | NO.: 74 | SAVAWYQQKPGKAPKLLIYWASTLHTGVPS |
| | | | RFSGSGSGTDFTLTISSLQPEDFATYYCQQ |
| | | | HYRTPFTFGQGTKLEIKR |
| S4-24 | CDR- | Residues 24-34 | RASQLVSSAVA |
| VL | L1 | of SEQ ID | |
| | | NO.: 74 | |
| S4-24 | CDR- | Residues 50-56 | WASTLHT |
| VL | L2 | of SEQ ID | |
| | | NO.: 74 | |
| S4-24 | CDR- | Residues 89-97 | QQHYRTPFT |
| VL | L3 | of SEQ | |
| | | ID NO.: 74 | |
| S4-40 | | SEQ ID | DIQMTQSPSSLSASVGDRVTITCRASQLVS |
| VL | | NO.: 75 | SAVAWYQQKPGKAPKLLIYWASTRHSGVPS |
| | | | RFSGSGSGTDFTLTISSLQPEDFATYYCQQ |
| | | | HYRTPFSFGQGTKLEIKR |
| S4-40 | CDR- | Residues 24-34 | RASQLVSSAVA |
| VL | L1 | of SEQ ID | |
| | | NO.: 75 | |
| S4-40 | CDR- | Residues 50-56 | WASTRHS |
| VL | L2 | of SEQ ID | |
| | | NO.: 75 | |
| S4-40 | CDR- | Residues 89-97 | QQHYRTPFS |
| VL | L3 | of SEQ | |
| | | ID NO.: 75 | |
| S4-17 | | SEQ ID | DIQMTQSPSSLSASVGDRVTITCRASQLVS |
| VL | | NO.: 76 | SAVAWYQQKPGKAPKLLIYWASTRHSGVPS |
| | | | RFSGSGSGTDFTLTISSLQPEDFATYYCQQ |
| | | | HYRTPFTFGQGTKLEIKR |
| S4-17 | CDR- | Residues 24-34 | RASQLVSSAVA |
| VL | L1 | of SEQ ID | |
| | | NO.: 76 | |
| S4-17 | CDR- | Residues 50-56 | WASTRHS |
| VL | L2 | of SEQ ID | |
| | | NO.: 76 | |
| S4-17 | CDR- | Residues 89-97 | QQHYRTPFT |
| VL | L3 | of SEQ | |
| | | ID NO.: 76 | |
| S4-54 | | SEQ ID | DIQMTQSPSSLSASVGDRVTITCRASQLVS |
| VL | | NO.: 77 | SAVAWYQQKPGKAPKLLIYWASARHTGVPS |
| | | | RFSGSGSGTDFTLTISSLQPEDFATYYCQQ |
| | | | HYKTPFSFGQGTKLEIKR |
| S4-54 | CDR- | Residues 24-34 | RASQLVSSAVA |
| VL | L1 | of SEQ ID | |
| | | NO.: 77 | |
| S4-54 | CDR- | Residues 50-56 | WASARHT |
| VL | L2 | of SEQ ID | |
| | | NO.: 77 | |
| S4-54 | CDR- | Residues 89-97 | QQHYKTPFS |
| VL | L3 | of SEQ | |
| | | ID NO.: 77 | |
| S4-12 | | SEQ ID | DIQMTQSPSSLSASVGDRVTITCRASQLVS |
| VL | | NO.: 78 | SAVAWYQQKPGKAPKLLIYWASARHTGVPS |
| | | | RFSGSGSGTDFTLTISSLQPEDFATYYCQQ |
| | | | HYKTPFTFGQGTKLEIKR |
| S4-12 | CDR- | Residues 24-34 | RASQLVSSAVA |
| VL | L1 | of SEQ ID | |
| | | NO.: 78 | |
| S4-12 | CDR- | Residues 50-56 | WASARHT |
| VL | L2 | of SEQ ID | |
| | | NO.: 78 | |
| S4-12 | CDR- | Residues 89-97 | QQHYKTPFT |
| VL | L3 | of SEQ | |
| | | ID NO.: 78 | |
| S4-74 | | SEQ ID | DIQMTQSPSSLSASVGDRVTITCRASQLVS |
| VL | | NO.: 79 | SAVAWYQQKPGKAPKLLIYWASARHTGVPS |
| | | | RFSGSGSGTDFTLTISSLQPEDFATYYCQQ |
| | | | HYRTPFTFGQGTKLEIKR |
| S4-74 | CDR- | Residues 24-34 | RASQLVSSAVA |
| VL | L1 | of SEQ ID | |
| | | NO.: 79 | |
| S4-74 | CDR- | Residues 50-56 | WASARHT |
| VL | L2 | of SEQ ID | |
| | | NO.: 79 | |
| S4-74 | CDR- | Residues 89-97 | QQHYRTPFT |
| VL | L3 | of SEQ | |
| | | ID NO.: 79 | |
| S4-34 | | SEQ ID | DIQMTQSPSSLSASVGDRVTITCRASQLVS |
| VL | | NO.: 80 | SAVAWYQQKPGKAPKLLIYWASTRHTGVPS |
| | | | RFSGSGSGTDFTLTISSLQPEDFATYYCQQ |
| | | | HYRTPFTFGQGTKLEIKR |
| S4-34 | CDR- | Residues 24-34 | RASQLVSSAVA |
| VL | L1 | of SEQ ID | |
| | | NO.: 80 | |
| S4-34 | CDR- | Residues 50-56 | WASTRHT |
| VL | L2 | of SEQ ID | |
| | | NO.: 80 | |
| S4-34 | CDR- | Residues 89-97 | QQHYRTPFT |
| VL | L3 | of SEQ | |
| | | ID NO.: 80 | |
| S4-31 | | SEQ ID | DIQMTQSPSSLSASVGDRVTITCRASQGVS |
| VL | | NO.: 81 | SALAWYQQKPGKAPKLLIYWASALHSGVPS |
| | | | RFSGSGSGTDFTLTISSLQPEDFATYYCQQ |
| | | | HYSAPFTFGQGTKLEIKR |
| S4-31 | CDR- | Residues 24-34 | RASQGVSSALA |
| VL | L1 | of SEQ ID | |
| | | NO.: 81 | |
| S4-31 | CDR- | Residues 50-56 | WASALHS |
| VL | L2 | of SEQ ID | |
| | | NO.: 81 | |
| S4-31 | CDR- | Residues 89-97 | QQHYSAPFT |
| VL | L3 | of SEQ | |
| | | ID NO.: 81 | |
| S4-18 | | SEQ ID | DIQMTQSPSSLSASVGDRVTITCRASQLVS |
| VL | | NO.: 82 | SAVAWYQQKPGKAPKLLIYWASTLHSGVPS |
| | | | RFSGSGSGTDFTLTISSLQPEDFATYYCQQ |
| | | | HYSTPFTFGQGTKLEIKR |
| S4-18 | CDR- | Residues 24-34 | RASQLVSSAVA |
| VL | L1 | of SEQ ID | |
| | | NO.: 82 | |
| S4-18 | CDR- | Residues 50-56 | WASTLHS |
| VL | L2 | of SEQ ID | |
| | | NO.: 82 | |
| S4-18 | CDR- | Residues 89-97 | QQHYSTPFT |
| VL | L3 | of SEQ | |
| | | ID NO.: 82 | |
| S4-6 | | SEQ ID | DIQMTQSPSSLSASVGDRVTITCKASQLVS |
| VL | | NO.: 83 | SAVAWYQQKPGKAPKLLIYWASTRHTGVPS |
| | | | RFSGSGSGTDFTLTISSLQPEDFATYYCQQ |
| | | | HYSTPFTFGQGTKLEIKR |
| S4-6 | CDR- | Residues 24-34 | KASQLVSSAVA |
| VL | L1 | of SEQ ID | |
| | | NO.: 83 | |
| S4-6 | CDR- | Residues 50-56 | WASTRHT |
| VL | L2 | of SEQ ID | |
| | | NO.: 83 | |
| S4-6 | CDR- | Residues 89-97 | QQHYSTPFT |
| VL | L3 | of SEQ | |
| | | ID NO.: 83 | |
| S4-55 | | SEQ ID | DIQMTQSPSSLSASVGDRVTITCKASQLVS |
| VL | | NO.: 84 | SAVAWYQQKPGKAPKLLIYWASTLHTGVPS |
| | | | RFSGSGSGTDFTLTISSLQPEDFATYYCQQ |
| | | | HYRTPFTFGQGTKLEIKR |
| S4-55 | CDR- | Residues 24-34 | KASQLVSSAVA |
| VL | L1 | of SEQ ID | |
| | | NO.: 84 | |
| S4-55 | CDR- | Residues 50-56 | WASTLHT |
| VL | L2 | of SEQ ID | |
| | | NO.: 84 | |
| S4-55 | CDR- | Residues 89-97 | QQHYRTPFT |
| VL | L3 | of SEQ | |
| | | ID NO.: 84 | |
| S4-63 | | SEQ ID | DIQMTQSPSSLSASVGDRVTITCKASQKVS |
| VL | | NO.: 85 | SALAWYQQKPGKAPKLLIYWASALHSGVPS |
| | | | RFSGSGSGTDFTLTISSLQPEDFATYYCQQ |
| | | | HYRPPFTFGQGTKLEIKR |
| S4-63 | CDR- | Residues 24-34 | KASQKVSSALA |
| VL | L1 | of SEQ ID | |
| | | NO.: 85 | |
| S4-63 | CDR- | Residues 50-56 | WASALHS |
| VL | L2 | of SEQ ID | |
| | | NO.: 85 | |
| S4-63 | CDR- | Residues 89-97 | QQHYRPPFT |
| VL | L3 | of SEQ | |
| | | ID NO.: 85 | |
| S4-50 | | SEQ ID | DIQMTQSPSSLSASVGDRVTITCKASQLVS |
| VL | | NO.: 86 | SAVAWYQQKPGKAPKLLIYWASALHTGVPS |
| | | | RFSGSGSGTDFTLTISSLQPEDFATYYCQQ |
| | | | HYSSPYTFGQGTKLEIKR |
| S4-50 | CDR- | Residues 24-34 | KASQLVSSAVA |
| VL | L1 | of SEQ ID | |
| | | NO.: 86 | |
| S4-50 | CDR- | Residues 50-56 | WASALHT |
| VL | L2 | of SEQ ID | |
| | | NO.: 86 | |
| S4-50 | CDR- | Residues 89-97 | QQHYSSPYT |
| VL | L3 | of SEQ | |
| | | ID NO.: 86 | |
| S4-19 | | SEQ ID | DIQMTQSPSSLSASVGDRVTITCKASQLVS |
| VL | | NO.: 87 | SAVAWYQQKPGKAPKLLIYWASTLHTGVPS |
| | | | RFSGSGSGTDFTLTISSLQPEDFATYYCQQ |
| | | | HYRTPFTFGQGTKLEIKR |
| S4-19 | CDR- | Residues 24-34 | KASQLVSSAVA |
| VL | L1 | of SEQ ID | |
| | | NO.: 87 | |
| S4-19 | CDR- | Residues 50-56 | WASTLHT |
| VL | L2 | of SEQ ID | |
| | | NO.: 87 | |
| S4-19 | CDR- | Residues 89-97 | QQHYRTPFT |
| VL | L3 | of SEQ | |
| | | ID NO.: 87 | |

[0140] The tables below provide a list of humanized MAK-199 antibodies that were converted into IgG proteins for characterization, both VH and VL sequences.

TABLE 1F
Humanized Anti-TNF MAK-199 Ab VH sequences
of IgG converted clones

| | | | Sequence |
|---|---|---|---|
| Protein region | | SEQ ID NO | 123456789012345678901234567890 |
| J662M2S3# | | SEQ ID | EVQLVQSGAEVKKPGASVKVSCKASGYTFA |
| 10 VH | | NO.: 88 | NYGIIWVRQAPGQGLEWMGWINTYTGKPTY |
| | | | AQKFQGRVTMTTDTSTSTAYMELSSLRSED |
| | | | TAVYYCARKLFTTMDVTDNAMDYWGQGTTV |
| | | | TVSS |
| J662M2S3#10 | CDR- | Residues 31-35 | NYGII |
| VH | H1 | of SEQ ID | |
| | | NO.: 88 | |
| J662M2S3#10 | CDR- | Residues 50-66 | WINTYTGKPTYAQKFQG |
| VH | H2 | of SEQ ID | |
| | | NO.: 88 | |
| J662M2S3#10 | CDR- | Residues 99-112 | RASQDISQYLN |
| VH | H3 | of SEQ | |
| | | ID NO.: 88 | |
| J662M2S3#13 | | SEQ ID | EVQLVQSGAEVKKPGASVKVSCKASGYTFN |
| VH | | NO.: 89 | NYGIIWVRQAPGQGLEWMGWINTYTGKPTY |
| | | | AQKLQGRVTMTTDTSTSTAYMELSSLRSED |
| | | | TAVYFCARKLFNTVDVTDNAMDYWGQGTTV |
| | | | TVSS |
| J662M2S3#13 | CDR- | Residues 31-35 | NYGII |
| VH | H1 | of SEQ ID | |
| | | NO.: 89 | |
| J662M2S3#13 | CDR- | Residues 50-66 | WINTYTGKPTYAQKLQG |
| VH | H2 | of SEQ ID | |
| | | NO.: 89 | |
| J662M2S3#13 | CDR- | Residues 99-112 | KLFNTVDVTDNAMD |
| VH | H3 | of SEQ | |
| | | ID NO.: 89 | |
| J662M2S3#15 | | SEQ ID | EVQLVQSGAEVKKPGASVKVSCKASGYTFN |
| VH | | NO.: 90 | NYGIIWVRQAPGQGLEWMGWINTYTGVPTY |
| | | | AQKFQGRVTMTTDTSTSTAYMELSSLRSED |
| | | | TAVYYCARKLFNTVDVTDNAMDYWGQGTTV |
| | | | TVSS |
| J662M2S3#15 | CDR- | Residues 31-35 | NYGII |
| VH | H1 | of SEQ ID | |
| | | NO.: 90 | |
| J662M2S3#15 | CDR- | Residues 50-66 | WINTYTGVPTYAQKFQG |
| VH | H2 | of SEQ ID | |
| | | NO.: 90 | |
| J662M2S3#15 | CDR- | Residues 99-112 | KLFNTVDVTDNAMD |
| VH | H3 | of SEQ | |
| | | ID NO.: 90 | |
| J662M2S3#16 | | SEQ ID | EVQLVQSGAEVKKPGASVKVSCKASGYTFN |
| VH | | NO.: 91 | NYGIIWVRQAPGQGLEWMGWINTYTGKPTY |
| | | | AQKFQGRVTMTTDTSTSTAYMELSSLRSED |
| | | | TAVYYCARKLFNTVAVTDNAMDYWGQGTTV |
| | | | TVSS |
| J662M2S3#16 | CDR- | Residues 31-35 | NYGII |
| VH | H1 | of SEQ ID | |
| | | NO.: 91 | |
| J662M2S3#16 | CDR- | Residues 50-66 | WINTYTGKPTYAQKFQG |
| VH | H2 | of SEQ ID | |
| | | NO.: 91 | |
| J662M2S3#16 | CDR- | Residues 99-112 | KLFNTVAVTDNAMD |
| VH | H3 | of SEQ | |
| | | ID NO.: 91 | |
| J662M2S3#21 | | SEQ ID | EVQLVQSGAEVKKPGASVKVSCKASGYTFR |
| VH | | NO.: 92 | NYGIIWVRQAPGQGLEWMGWINTYTGKPTY |
| | | | AQKFQGRVTMTTDTSTSTAYMELSSLRSED |
| | | | TAVYFCARKLFTTVDVTDNAMDYWGQGTTV |
| | | | TVSS |
| J662M2S3#21 | CDR- | Residues 31-35 | NYGII |
| VH | H1 | of SEQ ID | |
| | | NO.: 92 | |
| J662M2S3#21 | CDR- | Residues 50-66 | WINTYTGKPTYAQKFQG |
| VH | H2 | of SEQ ID | |
| | | NO.: 92 | |
| J662M2S3#21 | CDR- | Residues 99-112 | KLFTTVDVTDNAMD |
| VH | H3 | of SEQ | |
| | | ID NO.: 92 | |
| J662M2S3#34 | | SEQ ID | EVQLVQSGAEVKKPGASVKVSCKASGYTFN |
| VH | | NO.: 93 | NYGINWVRQAPGQGLEWMGWINTYTGKPTY |
| | | | AQKFQGRVTMTTDTSTSTAYMELSSLRSED |
| | | | TAVYFCARKFRNTVAVTDYAMDYWGQGTTV |
| | | | TVSS |
| J662M2S3#34 | CDR- | Residues 31-35 | NYGIN |
| VH | H1 | of SEQ ID | |
| | | NO.: 93 | |
| J662M2S3#34 | CDR- | Residues 50-66 | WINTYTGKPTYAQKFQG |
| VH | H2 | of SEQ ID | |
| | | NO.: 93 | |
| J662M2S3#34 | CDR- | Residues 99-112 | KFRNTVAVTDYAMD |
| VH | H3 | of SEQ | |
| | | ID NO.: 93 | |
| J662M2S3#36 | | SEQ ID | EVQLVQSGAEVKKPGASVKVSCKASGYTFR |
| VH | | NO.: 94 | NYGITWVRQAPGQGLEWMGWINTYTGKPTY |
| | | | AQKFQGRVTMTTDTSTSTAYMELSSLRSED |
| | | | TAVYFCARKLFTTMDVTDNAMDYWGQGTTV |
| | | | TVSS |
| J662M2S3#36 | CDR- | Residues 31-35 | NYGIT |
| VH | H1 | of SEQ ID | |
| | | NO.: 94 | |
| J662M2S3#36 | CDR- | Residues 50-66 | WINTYTGKPTYAQKFQG |
| VH | H2 | 66 of SEQ ID | |
| | | NO.: 94 | |
| J662M2S3#36 | CDR- | Residues 99-112 | KLFTTMDVTDNAMD |
| VH | H3 | of SEQ | |
| | | ID NO.: 94 | |
| J662M2S3#45 | | SEQ ID | EVQLVQSGAEVKKPGASVKVSCKASGYTFA |
| VH | | NO.: 95 | NYGIIWVRQAPGQGLEWMGWINTYTGKPTY |
| | | | AQKFQGRVTMTTDTSTSTAYMELSSLRSED |
| | | | TAVYYCARKLFTTMDVTDNAMDYWGQGTTV |
| | | | TVSS |
| J662M2S3#45 | CDR- | Residues 31-35 | NYGII |
| VH | H1 | of SEQ ID | |
| | | NO.: 95 | |
| J662M2S3#45 | CDR- | Residues 50-66 | WINTYTGKPTYAQKFQG |
| VH | H2 | 66 of SEQ ID | |
| | | NO.: 95 | |
| J662M2S3#45 | CDR- | Residues 99-112 | KLFTTMDVTDNAMD |
| VH | H3 | of SEQ | |
| | | ID NO.: 95 | |
| J662M2S3#58 | | SEQ ID | EVQLVQSGAEVKKPGASVKVSCKASGYTFS |
| VH | | NO.: 96 | NYGINWVRQAPGQGLEWMGWINTYTGQPSY |
| | | | AQKFQGRVTMTTDTSTSTAYMELSSLRSED |
| | | | TAVYYCARKLFKTEAVTDYAMDYWGQGTTV |
| | | | TVSS |
| J662M2S3#58 | CDR- | Residues 31-35 | NYGIN |
| VH | H1 | of SEQ ID | |
| | | NO.: 96 | |
| J662M2S3#58 | CDR- | Residues 50-66 | WINTYTGQPSYAQKFQG |
| VH | H2 | of SEQ ID | |
| | | NO.: 96 | |
| J662M2S3#58 | CDR- | Residues 99-112 | KLFKTEAVTDYAMD |
| VH | H3 | of SEQ | |
| | | ID NO.: 96 | |
| J662M2S3#72 | | SEQ ID | EVQLVQSGAEVKKPGASVKVSCKASGYTFN |
| VH | | NO.: 97 | NYGIIWVRQAPGQGLEWMGWINTYSGKPTY |
| | | | AQKFQGRVTMTTDTSTSTAYMELSSLRSED |
| | | | TAVYFCARKLFTTMDVTDNAMDYWGQGTTV |
| | | | TVSS |
| J662M2S3#72 | CDR- | Residues 31-35 | NYGII |
| VH | H1 | of SEQ ID | |
| | | NO.: 97 | |
| J662M2S3#72 | CDR- | Residues 50-66 | WINTYSGKPTYAQKFQG |
| VH | H2 | of SEQ ID | |
| | | NO.: 97 | |
| J662M2S3#72 | CDR- | Residues 99-112 | KLFTTMDVTDNAMD |
| VH | H3 | of SEQ | |
| | | ID NO.: 97 | |

TABLE 1G
Humanized Anti-TNF MAK-199 Ab VL sequences
of IgG converted clones

| | | | Sequence |
|---|---|---|---|
| Protein region | | SEQ ID NO | 123456789012345678901234567890 |
| J662M2S3# | | SEQ ID | DIQMTQSPSSLSASVGDRVTITCRASQDIS |
| 10 VL | | NO.: 98 | QYLNWYQQKPGKAPKLLIYYTSRLQSGVPS |
| | | | RFSGSGSGTDFTLTISSLQPEDFATYFCQQ |
| | | | GNTWPPTFGQGTKLEIK |
| J662M2S3#10 | CDR- | Residues 24-34 | RASQDISQYLN |
| VL | L1 | of SEQ ID | |
| | | NO.: 98 | |
| J662M2S3#10 | CDR- | Residues 50-56 | YTSRLQS |
| VL | L2 | of SEQ ID | |
| | | NO.: 98 | |
| J662M2S3#10 | CDR- | Residues 89-97 | QQGNTWPPT |
| VL | L3 | of SEQ | |
| | | ID NO.: 98 | |
| J662M2S3#13 | | SEQ ID | DIQMTQSPSSLSASVGDRVTITCRASQDIS |
| VL | | NO.: 99 | NYLNWYQQKPGKAPKLLIYYTSRLQSGVPS |
| | | | RFSGSGSGTDYTLTISSLQPEDFATYFCQQ |
| | | | GNSWPPTFGQGTKLEIK |
| J662M2S3#13 | CDR- | Residues 24-34 | RASQDISNYLN |
| VL | L1 | of SEQ ID | |
| | | NO.: 99 | |
| J662M2S3#13 | CDR- | Residues 50-56 | YTSRLQS |
| VL | L2 | of SEQ ID | |
| | | NO.: 99 | |
| J662M2S3#13 | CDR- | Residues 89-97 | QQGNSWPPT |
| VL | L3 | of SEQ | |
| | | ID NO.: 99 | |
| J662M2S3#15 | | SEQ ID | DIQMTQSPSSLSASVGDRVTITCRASQDIY |
| VL | | NO.: 100 | NYLNWYQQKPGKAPKLLIYYTSRLQSGVPS |
| | | | RFSGSGSGTDYTLTISSLQPEDFATYFCQQ |
| | | | GNTQPPTFGQGTKLEIK |
| J662M2S3#15 | CDR- | Residues 24-34 | RASQDIYNYLN |
| VL | L1 | of SEQ ID | |
| | | NO.: 100 | |
| J662M2S3#15 | CDR- | Residues 50-56 | YTSRLQS |
| VL | L2 | of SEQ ID | |
| | | NO.: 100 | |
| J662M2S3#15 | CDR- | Residues 89-97 | QQGNTQPPT |
| VL | L3 | of SEQ | |
| | | ID NO.: 100 | |
| J662M2S3#16 | | SEQ ID | DIQMTQSPSSDSASVGDRVTITCRASQDIE |
| VL | | NO.: 101 | NYLNWYQQKPGKAPKLLIYYTSRLQSGVPS |
| | | | RFSGSGSGTDFTLTISSLQPEDFATYFCQQ |
| | | | GNTQPPTFGQGTKLEIK |
| J662M2S3#16 | CDR- | Residues 24-34 | RASQDIENYLN |
| VL | L1 | 34 of SEQ ID | |
| | | NO.: 101 | |
| J662M2S3#16 | CDR- | Residues 50-56 | YTSRLQS |
| VL | L2 | of SEQ ID | |
| | | NO.: 101 | |
| J662M2S3#16 | CDR- | Residues 89-97 | QQGNTQPPT |
| VL | L3 | of SEQ | |
| | | ID NO.: 101 | |
| J662M2S3#21 | | SEQ ID | DIQMTQSPSSDSASVGDRVTITCRASQDIS |
| VL | | NO.: 102 | NYLNWYQQKPGKAPKLLIYYTSRLQSGVPS |
| | | | RFSGSGSGTDYTLTISSLQPEDFATYFCQQ |
| | | | GNTWPPTFGQGTKLEIK |
| J662M2S3#21 | CDR- | Residues 24-34 | RASQDISNYLN |
| VL | L1 | of SEQ ID | |
| | | NO.: 102 | |
| J662M2S3#21 | CDR- | Residues 50-56 | YTSRLQS |
| VL | L2 | of SEQ ID | |
| | | NO.: 102 | |
| J662M2S3#21 | CDR- | Residues 89-97 | QQGNTWPPT |
| VL | L3 | of SEQ | |
| | | ID NO.: 102 | |
| J662M2S3#34 | | SEQ ID | DIQMTQSPSSDSASVGDRVTITCRASQDIY |
| VL | | NO.: 103 | DVLNWYQQKPGKAPKLLIYYASRLQSGVPS |
| | | | RFSGSGSGTDFTLTISSLQPEDFATYYCQQ |
| | | | GITLPPTFGQGTKLEIK |
| J662M2S3#34 | CDR- | Residues 24-34 | RASQDIYDVLN |
| VL | L1 | of SEQ ID | |
| | | NO.: 103 | |
| J662M2S3#34 | CDR- | Residues 50-56 | YASRLQS |
| VL | L2 | of SEQ ID | |
| | | NO.: 103 | |
| J662M2S3#34 | CDR- | Residues 89-97 | QQGITLPPT |
| VL | L3 | of SEQ | |
| | | ID NO.: 103 | |
| J662M2S3#36 | | SEQ ID | DIQMTQSPSSDSASVGDRVTITCRASQDIS |
| VL | | NO.: 104 | NYLNWYQQKPGKAPKLLIYYTSRLQSGVPS |
| | | | RFSGSGSGTDYTLTISSLQPEDFATYFCQQ |
| | | | GNTWPPTFGQGTKLEIK |
| J662M2S3#36 | CDR- | Residues 24-34 | RASQDISNYLN |
| VL | L1 | of SEQ ID | |
| | | NO.: 104 | |
| J662M2S3#36 | CDR- | Residues 50-56 | YTSRLQS |
| VL | L2 | of SEQ ID | |
| | | NO.: 104 | |
| J662M2S3#36 | CDR- | Residues 89-97 | QQGNTWPPT |
| VL | L3 | of SEQ | |
| | | ID NO.: 104 | |
| J662M2S3#45 | | SEQ ID | DIQMTQSPSSLSASVGDRVTITCRASQDIS |
| VL | | NO.: 105 | QYLNWYQQKPGKAPKLLIYYTSRLQSGVPS |
| | | | RFSGSGSGTDFTLTISSLQPEDFATYFCQQ |
| | | | GNTWPPTFGQGTKLEIK |
| J662M2S3#45 | CDR- | Residues 24-34 | RASQDISQYLN |
| VL | L1 | of SEQ ID | |
| | | NO.: 105 | |
| J662M2S3#45 | CDR- | Residues 50-56 | YTSRLQS |
| VL | L2 | of SEQ ID | |
| | | NO.: 105 | |
| J662M2S3#45 | CDR- | Residues 89-97 | QQGNTWPPT |
| VL | L3 | of SEQ | |
| | | ID NO.: 105 | |
| J662M2S3#58 | | SEQ ID | DIQMTQSPSSLSASVGDRVTITCRASQNIY |
| VL | | NO.: 106 | NVLWYQQKPGKAPKLLIYYASRLQSGVPS |
| | | | RFSGSGSGTDFTLTISSLQPEDFATYFCQQ |
| | | | GNTMPPTFGQGTKLEIK |
| J662M2S3#58 | CDR- | Residues 24-34 | RASQNIYNVLN |
| VL | L1 | of SEQ ID | |
| | | NO.: 106 | |
| J662M2S3#58 | CDR- | Residues 50-56 | YASRLQS |
| VL | L2 | of SEQ ID | |
| | | NO.: 106 | |
| J662M2S3#58 | CDR- | Residues 89-97 | QQGNTMPPT |
| VL | L3 | of SEQ | |
| | | ID NO.: 106 | |
| J662M2S3#72 | | SEQ ID | DIQMTQSPSSLSASVGDRVTITCRASQDIS |
| VL | | NO.: 107 | NFLNWYQQKPGKAPKLLIYYTSRLQSGVPS |
| | | | RFSGSGSGTDYTLTISSLQPEDFATYFCQQ |
| | | | GNTQPPTFGQGTKLEIK |
| J662M2S3#72 | CDR- | Residues 24-34 | RASQDISNFLN |
| VL | L1 | of SEQ ID | |
| | | NO.: 107 | |
| J662M2S3#72 | CDR- | Residues 50-56 | YTSRLQS |
| VL | L2 | of SEQ ID | |
| | | NO.: 107 | |
| J662M2S3#72 | CDR- | Residues 89-97 | QQGNTQPPT |
| VL | L3 | of SEQ | |
| | | ID NO.: 107 | |

[0141] The following tables provide anti-IL-17 sequences from converted clones.

TABLE 1H
Individual Anti-IL-17 Ab VH Sequences from Converted
Clones for Generating DVD-Binding Proteins

| | | | Sequence |
|---|---|---|---|
| Protein region | | SEQ ID NO | 123456789012345678901234567890 |
| h10f7VH.1a. | | SEQ ID | EVQLVQSGAEVKKPGSSVKVSCKASGYTFT |
| g1m | | NO.: 108 | DYEIHWVRQAPGQGLEWIGVNDPESGGTFY |
| VH | | | NQKFDGRATLTADKSTSTAYMELSSLRSED |
| | | | TAVYYCTRYYRYESFYGMDYWGQGTTVTVS |
| | | | S |
| h10f7VH.1a. | CDR- | Residues 31-35 | DYEIH |
| g1m | H1 | of SEQ ID | |
| VH | | NO.: 108 | |
| h10f7VH.1a. | CDR- | Residues 50-66 | VNDPESGGTFYNQKFDG |
| g1m | H2 | of SEQ ID | |
| VH | | NO.: 108 | |
| h10f7VH.1a. | CDR- | Residues 99-110 | YYRYESFYGMDY |
| g1m | H3 | of SEQ | |
| VH | | ID NO.: 108 | |
| J439M1S3R5 | | SEQ ID | EVQLVQSGAEVKKPGSSVKVSCKASGYTFD |
| #10 | | NO.: 109 | DYEIHWVRQAPGQGLEWIGVNDPESGGTFY |
| VH | | | NQKFDGRATLTADKSTSTAYMELSSLRSED |
| | | | TAVYYCTRYDKWDSFYGMDYWGQGTTVTVS |
| | | | S |
| J439M1S3R5 | CDR- | Residues 31-35 | DYEIH |
| #10 | H1 | of SEQ ID | |
| VH | | NO.: 109 | |
| J439M1S3R5 | CDR- | Residues 50-66 | VNDPESGGTFYNQKFDG |
| #10 | H2 | of SEQ ID | |
| VH | | NO.: 109 | |
| J439M1S3R5 | CDR- | Residues 99-110 | YDKWDSFYGMDY |
| #10 | H3 | of SEQ | |
| VH | | ID NO.: 109 | |
| J439M1S3R5 | | SEQ ID | EVQLVQSGAEVKKPGSSVKVSCKASGYTFT |
| #11 | | NO.: 110 | DYEIHWVRQAPGQGLEWMGVNDPESGGTFY |
| VH | | | NQKFDGRVTLTADESTSTAYMELSSLRSED |
| | | | TAVYYCTRYSKYWDSFDGMDYWGQGTTVTVS |
| | | | S |
| J439M1S3R5 | CDR- | Residues 31-35 | DYEIH |
| #11 | H1 | of SEQ ID | |
| VH | | NO.: 110 | |
| J439M1S3R5 | CDR- | Residues 50-66 | VNDPESGGTFYNQKFDG |
| #11 | H2 | of SEQ ID | |
| VH | | NO.: 110 | |
| J439M1S3R5 | CDR- | Residues 99-110 | YSKWDSFDGMDY |
| #11 | H3 | of SEQ | |
| VH | | ID NO.: 110 | |
| J439M1S2 | | SEQ ID | EVQLVQSGAEVKKPGSSVKVSCKASGYTFT |
| (H)3 #A6 | | NO.: 111 | DYEIHWVRQAPGQGLEWIGVNDPDSGGTLY |
| VH | | | NQKFDGRVTLTADESTSTAYMELSSLRSED |
| | | | TAVYYCTRYDKWYSFEGMDIWGQGTTVTVS |
| | | | S |
| 439M1S52 | CDR- | Residues 31-35 | DYEIH |
| (H)3 #A6 | H1 | of SEQ ID | |
| VH | | NO.: 111 | |
| 439M1S2 | CDR- | Residues 50-66 | VNDPDSGGTLYNQKFDG |
| (H)3 #A6 | H2 | of SEQ ID | |
| VH | | NO.: 111 | |
| 439M1S2 | CDR- | Residues 99-110 | YDKWYSFEGMDI |
| (H)3 #A6 | H3 | of SEQ | |
| VH | | ID NO.: 111 | |
| J439M1S2 | | SEQ ID | EVQLVQSGAEVKKPGSSVKVSCKASGYTFT |
| (H)3 #A11 | | NO.: 112 | DYEIHWVRQAPGQGLEWIGVNDPESGGTFY |
| VH | | | NQKFDGRVTLTADESTSTAYMELSSLRSED |
| | | | TAVYYCTRYDKYWSFEGMDYWGQGTTVTVS |
| | | | S |
| J439M1S2 | CDR- | Residues 31-35 | DYEIH |
| (H)3 #A11 | H1 | of SEQ ID | |
| VH | | NO.: 112 | |
| J439M1S2 | CDR- | Residues 50-66 | VNDPESGGTFYNQKFDG |
| (H)3 #A11 | H2 | of SEQ ID | |
| VH | | NO.: 112 | |
| J439M1S2 | CDR- | Residues 99-110 | YDKYWSFEGMDY |
| (H)3 #A11 | H3 | of SEQ | |
| VH | | ID NO.: 112 | |
| J439M1S2 | | SEQ ID | EVQLVQSGAEVKKPGSSVKVSCKASGYTFS |
| (H)3 #A16 | | NO.: 113 | DYEIHWVRQAPGQGLEWMGVNDPESGGTFY |
| VH | | | NQKFDGRVTLTADESTSTAYMELSSLRSED |
| | | | TAVYYCTRYDKWYSFEGMDIWGQGTTVTVS |
| | | | S |
| J439M1S2 | CDR- | Residues 31-35 | DYEIH |
| (H)3 #A16 | H1 | of SEQ ID | |
| VH | | NO.: 113 | |
| J439M1S2 | CDR- | Residues 50-66 | VNDPESGGTFYNQKFDG |
| (H)3 #A16 | H2 | of SEQ ID | |
| VH | | NO.: 113 | |
| J439M1S2 | CDR- | Residues 99-110 | DKWYSFEGMDI |
| (H)3 #A16 | H3 | of SEQ | |
| VH | | ID NO.: 113 | |
| J439M1S2 | | SEQ ID | EVQLVQSGAEVKKPGSSVKVSCKASGYTFS |
| (H)3 #B13 | | NO.: 114 | DYEIHWVRQAPGQGLEWMGVNDPESGGTFY |
| VH | | | NQKFDGRVTLTADESTSTAYMELSSLRSED |
| | | | TAVYYCTRYDKYWSFEGMDYWGQGTTVTVS |
| | | | S |
| J439M1S2 | CDR- | Residues 31-35 | DYEIH |
| (H)3 #B13 | H1 | of SEQ ID | |
| VH | | NO.: 114 | |
| J439M1S2 | CDR- | Residues 50-66 | VNDPESGGTFYNQKFDG |
| (H)3 #B13 | H2 | of SEQ ID | |
| VH | | NO.: 114 | |
| J439M1S2 | CDR- | Residues 99-110 | DKYWSFEGMDY |
| (H)3 #B13 | H3 | of SEQ | |
| VH | | ID NO.: 114 | |
| J439M1S2 | | SEQ ID | EVQLVQSGAEVKKPGSSVKVSCKASGYTFT |
| (H)3 #B20 | | NO.: 115 | DYEIHWVRQAPGQGLEWMGVNDPESGGTFY |
| VH | | | NQKFDGRVTLTADESTSTAYMELSSLRSED |
| | | | TAVYYCTRYDKWYSFEGMDIWGQGTTVTVS |
| | | | S |
| J439M1S2 | CDR- | Residues 31-35 | DYEIH |
| (H)3 #B20 | H1 | of SEQ ID | |
| VH | | NO.: 115 | |
| J439M1S2 | CDR- | Residues 50-66 | VNDPESGGTFYNQKFDG |
| (H)3 #B20 | H2 | of SEQ ID | |
| VH | | NO.: 115 | |
| J439M1S2 | CDR- | Residues 99-110 | DKWYSFEGMDI |
| (H)3 #B20 | H3 | of SEQ | |
| VH | | ID NO.: 115 | |

TABLE 1I
Individual Anti-IL-17 Ab VL Sequences from Converted Clones
for Generating DVD-Binding Proteins

| | | | Sequence |
|---|---|---|---|
| Protein region | | SEQ ID No. | 123456789012345678901234567890 |
| J439M1S3R5 | | SEQ ID | DIQMTQSPSSLSASVGDRVTITCSASSGSI |
| #10 | | NO.: 116 | SYIDWFQQKPGKAPKRLIYATFELASGVPS |
| VL | | | RFSGSGSGTDFTLTISSLQPEDFATYYCHQ |
| | | | LGSYPDTFGQGTKLEIK |
| J439M1S3R5 | CDR- | Residues 24-34 | SASSGSISYID |
| #10 | L1 | of SEQ ID | |
| VL | | NO.: 116 | |
| J439M1S3R5 | CDR- | Residues 50-56 | ATFELAS |
| #10 | L2 | of SEQ ID | |
| VL | | NO.: 116 | |
| J439M1S3R5 | CDR- | Residues 89-97 | HQLGSYPDT |
| #10 | L3 | of SEQ | |
| VL | | ID NO.: 116 | |
| J439M1S3R5 | | SEQ ID | DIQMTQSPSSLSASVGDRVTITCRASSGII |
| #11 | | NO.: 117 | SYIDWFQQKPGKAPKRLIYATFDLASGVPS |
| VL | | | RFSGSGSGTDYTLTISSLQPEDFATYYCRQ |
| | | | VGSYPETFGQGTKLEIK |
| J439M1S3R5 | CDR- | Residues 24-34 | RASSGIISYID |
| #11 | L1 | of SEQ ID | |
| VL | | NO.: 117 | |
| J439M1S3R5 | CDR- | Residues 50-56 | ATFDLAS |
| #11 | L2 | of SEQ ID | |
| VL | | NO.: 117 | |
| J439M1S3R5 | CDR- | Residues 89-97 | RQVGSYPET |
| #11 | L3 | of SEQ | |
| VL | | ID NO.: 117 | |
| J427 M2S3 | | SEQ ID | DIQMTQSPSSLSASVGDRVTITCSASSGII |
| #12 | | NO.: 118 | SSIDWFQQKPGKAPKRLIYATFALQSGVPS |
| VL | | | RFSGSGSGTDFTLTISSLQPEDFATYYCSQ |
| | | | MSSYPHTFGQGTKLEIK |
| J427 M2S3 | CDR- | Residues 24-34 | SASSGIISSID |
| #12 | L1 | of SEQ ID | |
| VL | | NO.: 118 | |
| J427 M2S3 | CDR- | Residues 50-56 | ATFALQS |
| #12 | L2 | of SEQ ID | |
| VL | | NO.: 118 | |
| J427 M2S3 | CDR- | Residues 89-97 | SQMSSYPHT |
| #12 | L3 | of SEQ | |
| VL | | ID NO.: 118 | |
| J427 M2S3 | | SEQ ID | DIQMTQSPSSLSASVGDRVTITCSASSDIS |
| #27 | | NO.: 119 | SYLNWFQQKPGKSPKRLIYRTSELQSGVPS |
| VL | | | RFSGSGSGTDFTLTISSLQPEDFATYYCQQ |
| | | | WSSYPWTFGQGTKLEIK |
| J427 M2S3 | CDR- | Residues 24-34 | SASSDISSYLN |
| #27 | L1 | of SEQ ID | |
| VL | | NO.: 119 | |
| J427 M2S3 | CDR- | Residues 50-56 | RTSELQS |
| #27 | L2 | of SEQ ID | |
| VL | | NO.: 119 | |
| J427 M2S3 | CDR- | Residues 89-97 | QQWSSYPWT |
| #27 | L3 | of SEQ | |
| VL | | ID NO.: 119 | |
| J439M1S2 | | SEQ ID | DIQMTQSPSSLSASVGDRVTITCSASQGIR |
| (H)3#A6 | | NO.: 120 | SYIDWFQQKPGKSPKRLIYATFDLASGVPS |
| VL | | | RFSGSGSGTDYTLTISSLQPEDFATYYCRQ |
| | | | VGNYPGTFGQGTKLEIK |
| J439M1S2 | CDR- | Residues 24-34 | SASQGIRSYID |
| (H)3#A6 | L1 | of SEQ ID | |
| VL | | NO.: 120 | |
| J439M1S2 | CDR- | Residues 50-56 | ATFDLAS |
| (H)3#A6 | L2 | of SEQ ID | |
| VL | | NO.: 120 | |
| J439M1S2 | CDR- | Residues 89-97 | RQVGNYPGT |
| (H)3#A6 | L3 | of SEQ | |
| VL | | ID NO.: 120 | |

[0142] Detailed description of specific DVD-binding protein molecules capable of binding specific targets, and methods of making the same, is provided in the Examples section below.

[0143] B) Production of DVD-Binding Proteins

[0144] The binding proteins provided herein may be produced by any of a number of techniques known in the art. For example, expression from host cells, wherein expression vector(s) encoding the DVD heavy and DVD light chains is (are) transfected into a host cell by standard techniques. The various forms of the term “transfection” are intended to encompass a wide variety of techniques commonly used for the introduction of exogenous DNA into a prokaryotic or eukaryotic host cell, e.g., electroporation, calcium-phosphate precipitation, DEAE-dextran transfection and the like. Although it is possible to express the DVD-binding proteins provided herein in either prokaryotic or eukaryotic host cells, DVD proteins are expressed in eukaryotic cells, for example, mammalian host cells, because such eukaryotic cells (and in particular mammalian cells) are more likely than prokaryotic cells to assemble and secrete a properly folded and immunologically active DVD protein.

[0145] Exemplary mammalian host cells for expressing the recombinant antibodies provided herein include Chinese Hamster Ovary (CHO cells) (including dhfr-CHO cells, described in Urlaub and Chasin (1980) Proc. Natl. Acad. Sci. USA 77:4216-4220, used with a DHFR selectable marker, e.g., as described in Kaufman and Sharp (1982) Mol. Biol. 159:601-621), NS0 myeloma cells, COS cells, SP2 and PER.C6 cells. When recombinant expression vectors encoding DVD proteins are introduced into mammalian host cells, the DVD proteins are produced by culturing the host cells for a period of time sufficient to allow for expression of the DVD proteins in the host cells or secretion of the DVD proteins into the culture medium in which the host cells are grown. DVD proteins can be recovered from the culture medium using standard protein purification methods.

[0146] In an exemplary system for recombinant expression of DVD proteins provided herein, a recombinant expression vector encoding both the DVD heavy chain and the DVD light chain is introduced into dhfr-CHO cells by calcium phosphate-mediated transfection. Within the recombinant expression vector, the DVD heavy and light chain genes are each operatively linked to CMV enhancer/AdMLP promoter regulatory elements to drive high levels of transcription of the genes. The recombinant expression vector also carries a DHFR gene, which allows for selection of CHO cells that have been transfected with the vector using methotrexate selection/amplification. The selected transformant host cells are cultured to allow for expression of the DVD heavy and light chains and intact DVD protein is recovered from the culture medium. Standard molecular biology techniques are used to prepare the recombinant expression vector, transfect the host cells, select for transformants, culture the host cells and recover the DVD protein from the culture medium. A method of synthesizing a DVD protein provided herein by culturing a host cell provided herein in a suitable culture medium until a DVD protein is synthesized is also provided. The method can further comprise isolating the DVD protein from the culture medium.

[0147] An important feature of DVD-binding protein is that it can be produced and purified in a similar way as a conventional antibody. The production of DVD-binding protein results in a homogeneous, single major product with desired dual-specific activity, without any sequence modification of the constant region or chemical modifications of any kind. Other previously described methods to generate “bi-specific”, “multi-specific”, and “multi-specific multivalent” full length binding proteins do not lead to a single primary product but instead lead to the intracellular or secreted production of a mixture of assembled inactive, mono-specific, multi-specific, multivalent, full length binding proteins, and multivalent full length binding proteins with combination of different binding sites. As an example, based on the design described by Miller and Presta (PCT Publication No. WO2001/077342), there are 16 possible combinations of heavy and light chains. Consequently only 6.25% of protein is likely to be in the desired active form, and not as a single major product or single primary product compared to the other 15 possible combinations. Separation of the desired, fully active forms of the protein from inactive and partially active forms of the protein using standard chromatography techniques, typically used in large scale manufacturing, is yet to be demonstrated.

[0148] Surprisingly the design of the “dual-specific multivalent full length binding proteins” provided herein leads to a dual variable domain light chain and a dual variable domain heavy chain which assemble primarily to the desired “dual-specific multivalent full length binding proteins”.

[0149] At least 50%, at least 75% and at least 90% of the assembled, and expressed dual variable domain immunoglobulin molecules are the desired dual-specific tetravalent protein. This embodiment particularly enhances commercial utility. Therefore, a method to express a dual variable domain light chain and a dual variable domain heavy chain in a single cell leading to a single primary product of a “dual-specific tetravalent full length binding protein” is provided.

[0150] Methods of expressing a dual variable domain light chain and a dual variable domain heavy chain in a single cell leading to a “primary product” of a “dual-specific tetravalent full length binding protein”, where the “primary product” is more than 50%, such as more than 75% and more than 90%, of all assembled protein, comprising a dual variable domain light chain and a dual variable domain heavy chain are provided.

[0151] II) Derivatized DVD-Binding Proteins

[0152] One embodiment provides a labeled binding protein wherein the binding protein is derivatized or linked to another functional molecule (e.g., another peptide or protein). For example, a labeled binding protein can be derived by functionally linking a binding protein provided herein (by chemical coupling, genetic fusion, noncovalent association or otherwise) to one or more other molecular entities, such as another antibody (e.g., a bispecific antibody or a diabody), a detectable agent, a cytotoxic agent, a pharmaceutical agent, and/or a protein or peptide that can mediate association of the binding protein with another molecule (such as a streptavidin core region or a polyhistidine tag). Approaches to derivatizing proteins are exemplified in the art and within the skill of the person of ordinary skill in the art.

[0153] III) Uses of DVD-Binding Proteins

[0154] Given their ability to bind to two or more antigens the binding proteins provided herein can be used to detect the antigens (e.g., in a biological sample, such as serum or plasma), using a conventional immunoassay, such as an enzyme linked immunosorbent assays (ELISA), an radioimmunoassay (RIA) or tissue immunohistochemistry. The DVD-binding protein is directly or indirectly labeled with a detectable substance to facilitate detection of the bound or unbound antibody. Suitable detectable substances include various enzymes, prosthetic groups, fluorescent materials, luminescent materials and radioactive materials. Examples of suitable enzymes include horseradish peroxidase, alkaline phosphatase, β-galactosidase, or acetylcholinesterase; examples of suitable prosthetic group complexes include streptavidin/biotin and avidin/biotin; examples of suitable fluorescent materials include umbelliferone, fluorescein, fluorescein isothiocyanate, rhodamine, dichlorotriazinylamine fluorescein, dansyl chloride or phycoerythrin; an example of a luminescent material includes luminol; and examples of suitable radioactive material include ³H, ¹⁴C, ³⁵S, ⁹⁰Y, ⁹⁹Tc, ¹¹¹In, ¹²⁵I, ¹³¹I, ¹⁷⁷Lu, ¹⁶⁶Ho, or ¹⁵³Sm.

[0155] In an embodiment, the binding proteins provided herein are capable of neutralizing the activity of the antigens both in vitro and in vivo. Accordingly, such DVD-binding proteins can be used to inhibit antigen activity, e.g., in a cell culture containing the antigens, in human subjects or in other mammalian subjects having the antigens with which a binding protein provided herein cross-reacts. In another embodiment, a method for reducing antigen activity in a subject suffering from a disease or disorder in which the antigen activity is detrimental is provided. A binding protein provided herein can be administered to a human subject for therapeutic purposes.

[0156] The term “a disorder in which antigen activity is detrimental” is intended to include diseases and other disorders in which the presence of the antigen in a subject suffering from the disorder has been shown to be or is suspected of being either responsible for the pathophysiology of the disorder or a factor that contributes to a worsening of the disorder. Accordingly, a disorder in which antigen activity is detrimental is a disorder in which reduction of antigen activity is expected to alleviate the symptoms and/or progression of the disorder. Such disorders may be evidenced, for example, by an increase in the concentration of the antigen in a biological fluid of a subject suffering from the disorder (e.g., an increase in the concentration of antigen in serum, plasma, synovial fluid, etc. of the subject). Non-limiting examples of disorders that can be treated with the binding proteins provided herein include those disorders discussed below and in the section pertaining to pharmaceutical compositions comprising the binding proteins.

[0157] DVD-binding proteins are useful as therapeutic agents to simultaneously block two different targets to enhance efficacy/safety and/or increase patient coverage. Such targets may include soluble targets (TNF) and cell surface receptor targets (VEGFR and EGFR). It can also be used to induce redirected cytotoxicity between tumor cells and T cells (Her2 and CD3) for cancer therapy, or between autoreactive cell and effector cells for autoimmune disease or transplantation, or between any target cell and effector cell to eliminate disease-causing cells in any given disease.

[0158] In addition, DVD-binding protein can be used to trigger receptor clustering and activation when it is designed to target two different epitopes on the same receptor. This may have benefit in making agonistic and antagonistic anti-GPCR therapeutics. In this case, DVD-binding protein can be used to target two different epitopes (including epitopes on both the loop regions and the extracellular domain) on one cell for clustering/signaling (two cell surface molecules) or signaling (on one molecule). Similarly, a DVD-binding protein molecule can be designed to trigger CTLA-4 ligation, and a negative signal by targeting two different epitopes (or 2 copies of the same epitope) of CTLA-4 extracellular domain, leading to down regulation of the immune response. CTLA-4 is a clinically validated target for therapeutic treatment of a number of immunological disorders. CTLA-4/B7 interactions negatively regulate T cell activation by attenuating cell cycle progression, IL-2 production, and proliferation of T cells following activation, and CTLA-4 (CD152) engagement can down-regulate T cell activation and promote the induction of immune tolerance. However, the strategy of attenuating T cell activation by agonistic antibody engagement of CTLA-4 has been unsuccessful since CTLA-4 activation requires ligation. The molecular interaction of CTLA-4/B7 is in “skewed zipper” arrays, as demonstrated by crystal structural analysis (Stamper 2001 Nature 410:608). However none of the currently available CTLA-4 binding reagents have ligation properties, including anti-CTLA-4 mAbs. There have been several attempts to address this issue. In one case, a cell member-bound single chain antibody was generated, and significantly inhibited allogeneic rejection in mice (Hwang 2002 JI 169:633). In a separate case, artificial APC surface-linked single-chain antibody to CTLA-4 was generated and demonstrated to attenuate T cell responses (Griffin 2000 JI 164:4433). In both cases, CTLA-4 ligation was achieved by closely localized member-bound antibodies in artificial systems. While these experiments provide proof-of-concept for immune down-regulation by triggering CTLA-4 negative signaling, the reagents used in these reports are not suitable for therapeutic use. To this end, CTLA-4 ligation may be achieved by using a DVD-binding protein molecule, which target two different epitopes (or 2 copies of the same epitope) of CTLA-4 extracellular domain. The rationale is that the distance spanning two binding sites of an IgG, approximately 150-170 Å, is too large for active ligation of CTLA-4 (30-50 Å between 2 CTLA-4 homodimer). However the distance between the two binding sites on DVD-binding protein (one arm) is much shorter, also in the range of 30-50 Å, allowing proper ligation of CTLA-4.

[0159] Similarly, DVD-binding protein can target two different members of a cell surface receptor complex (e.g., IL-12R alpha and beta). Furthermore, DVD-binding protein can target CR1 and a soluble protein/pathogen to drive rapid clearance of the target soluble protein/pathogen.

[0160] Additionally, DVD-binding proteins provided herein can be employed for tissue-specific delivery (target a tissue marker and a disease mediator for enhanced local PK thus higher efficacy and/or lower toxicity), including intracellular delivery (targeting an internalizing receptor and a intracellular molecule), delivering to inside brain (targeting transferrin receptor and a CNS disease mediator for crossing the blood-brain barrier). DVD-binding protein can also serve as a carrier protein to deliver an antigen to a specific location via binding to a non-neutralizing epitope of that antigen and also to increase the half-life of the antigen. Furthermore, DVD-binding protein can be designed to either be physically linked to medical devices implanted into patients or target these medical devices (see Burke et al. (2006) Advanced Drug Deliv. Rev. 58(3): 437-446; Hildebrand et al. (2006) Surface and Coatings Technol. 200(22-23): 6318-6324; Drug/device combinations for local drug therapies and infection prophylaxis, Wu (2006) Biomaterials 27(11):2450-2467; Mediation of the cytokine network in the implantation of orthopedic devices, Marques (2005) Biodegradable Systems in Tissue Engineer. Regen. Med. 377-397). Briefly, directing appropriate types of cell to the site of medical implant may promote healing and restoring normal tissue function. Alternatively, inhibition of mediators (including but not limited to cytokines), released upon device implantation by a DVD coupled to or target to a device is also provided. For example, Stents have been used for years in interventional cardiology to clear blocked arteries and to improve the flow of blood to the heart muscle. However, traditional bare metal stents have been known to cause restenosis (re-narrowing of the artery in a treated area) in some patients and can lead to blood clots. Recently, an anti-CD34 antibody coated stent has been described which reduced restenosis and prevents blood clots from occurring by capturing endothelial progenitor cells (EPC) circulating throughout the blood. Endothelial cells are cells that line blood vessels, allowing blood to flow smoothly. The EPCs adhere to the hard surface of the stent forming a smooth layer that not only promotes healing but prevents restenosis and blood clots, complications previously associated with the use of stents (Aoji et al. (2005) J. Am. Coll. Cardiol. 45(10):1574-9). In addition to improving outcomes for patients requiring stents, there are also implications for patients requiring cardiovascular bypass surgery. For example, a prosthetic vascular conduit (artificial artery) coated with anti-EPC antibodies would eliminate the need to use arteries from patients legs or arms for bypass surgery grafts. This would reduce surgery and anesthesia times, which in turn will reduce coronary surgery deaths. DVD-binding protein are designed in such a way that it binds to a cell surface marker (such as CD34) as well as a protein (or an epitope of any kind, including but not limited to proteins, lipids and polysaccharides) that has been coated on the implanted device to facilitate the cell recruitment. Such approaches can also be applied to other medical implants in general. Alternatively, DVD-binding proteins can be coated on medical devices and upon implantation and releasing all DVDs from the device (or any other need which may require additional fresh DVD-binding protein, including aging and denaturation of the already loaded DVD-binding protein) the device could be reloaded by systemic administration of fresh DVD-binding protein to the patient, where the DVD-binding protein is designed to binds to a target of interest (a cytokine, a cell surface marker (such as CD34) etc.) with one set of binding sites and to a target coated on the device (including a protein, an epitope of any kind, including but not limited to lipids, polysaccharides and polymers) with the other. This technology has the advantage of extending the usefulness of coated implants.

[0161] C) Use of DVD-Binding Proteins in Various Diseases

[0162] DVD-binding protein molecules provided herein are also useful as therapeutic molecules to treat various diseases. Such DVD molecules may bind one or more targets involved in a specific disease. Examples of such targets in various diseases are described below.

[0163] 1) Human Autoimmune and Inflammatory Response

[0164] TNF plays a critical role in the pathology associated with a variety of diseases involving immune and inflammatory elements, such as autoimmune diseases, particularly those associated with inflammation, including Crohn's disease, psoriasis (including plaque psoriasis), arthritis (including rheumatoid arthritis, psoratic arthritis, osteoarthritis, or juvenile idiopathic arthritis), multiple sclerosis, and ankylosing spondylitis. Therefore, the binding proteins herein may be used to treat these disorders. It is also involved in inflammatory and/or autoimmune conditions of various organs. IL-17 has been linked to many immune/autoimmune related diseases including rheumatoid arthritis, asthma, lupus, allograft rejection and anti-tumour immunity.

[0165] 2) Asthma

[0166] Allergic asthma is characterized by the presence of eosinophilia, goblet cell metaplasia, epithelial cell alterations, airway hyperreactivity (AHR), and Th2 and Th1 cytokine expression, as well as elevated serum IgE levels. It is now widely accepted that airway inflammation is the key factor underlying the pathogenesis of asthma, involving a complex interplay of inflammatory cells such as T cells, B cells, eosinophils, mast cells and macrophages, and of their secreted mediators including cytokines and chemokines. Corticosteroids are the most important anti-inflammatory treatment for asthma today, however their mechanism of action is non-specific and safety concerns exist, especially in the juvenile patient population. The development of more specific and targeted therapies is therefore warranted.

[0167] TNF-α may amplify the inflammatory response in asthma and may be linked to disease severity (McDonnell et al. (2001) Progress Respir. Res. 31:247-250).

[0168] Animal models such as OVA-induced asthma mouse model, where both inflammation and AHR can be assessed, are known in the art and may be used to determine the ability of various DVD-binding protein molecules to treat asthma.

[0169] 3) Rheumatoid Arthritis

[0170] Rheumatoid arthritis (RA), a systemic disease, is characterized by a chronic inflammatory reaction in the synovium of joints and is associated with degeneration of cartilage and erosion of juxta-articular bone. Many pro-inflammatory cytokines including TNF, chemokines, and growth factors are expressed in diseased joints. Systemic administration of anti-TNF antibody or sTNFR fusion protein to mouse models of RA was shown to be anti-inflammatory and joint protective. Clinical investigations in which the activcity of TNF in RA patients was blocked with intravenously administered infliximab (Harriman G, Harper L K, Schaible T F. 1999 Summary of clinical trials in rheumatoid arthritis using infliximab, an anti-TNFalpha treatment. Ann Rheum Dis 58 Suppl 1:I61-4), a chimeric anti-TNF mAb, has provided evidence that TNF regulates IL-6, IL-8, MCP-1, and VEGF production, recruitment of immune and inflammatory cells into joints, angiogenesis, and reduction of blood levels of matrix metalloproteinases-1 and -3. A better understanding of the inflammatory pathway in rheumatoid arthritis has led to identification of other therapeutic targets involved in rheumatoid arthritis. Promising treatments such as interleukin-6 antagonists (IL-6 receptor antibody MRA, developed by Chugai, Roche (see Nishimoto, Norihiro et al. (2004) Arthritis Rheum. 50(6):1761-1769), CTLA4Ig (abatacept, Genovese et al. (2005) N. Engl. J. Med. 353:1114-23), and anti-B cell therapy (rituximab, Okamoto and Kamatani (2004) N. Engl. J. Med. 351:1909) have already been tested in randomized controlled trials over the past year. Other cytokines have been identified and have been shown to be of benefit in animal models, including interleukin-15 (therapeutic antibody HuMax-IL_{—}15, AMG 714 see Baslund et al. (2005) Arthritis Rheum. 52(9): 2686-2692), interleukin-17, and interleukin-18, and clinical trials of these agents are currently under way. Dual-specific antibody therapy, combining anti-TNF and another mediator, has great potential in enhancing clinical efficacy and/or patient coverage. For example, blocking both TNF and VEGF can potentially eradicate inflammation and angiogenesis, both of which are involved in pathophysiology of RA. Blocking other pairs of targets involved in RA including, but not limited to, TNF and IL-18; TNF and IL-12; TNF and IL-23; TNF and IL-1beta; TNF and MIF; TNF and IL-17; and TNF and IL-15 with specific DVD-binding protein is also contemplated. In addition to routine safety assessments of these target pairs, specific tests for the degree of immunosuppression may be warranted and helpful in selecting the best target pairs (see Luster et al. (1994) Toxicology 92(1-3):229-43). Whether a DVD-binding protein molecule will be useful for the treatment of rheumatoid arthritis can be assessed using pre-clinical animal RA models such as the collagen-induced arthritis mouse model. Other useful models are also well known in the art (see Brand (2005) Comp. Med. 55(2):114-22). Based on the cross-reactivity of the parental antibodies for human and mouse othologues (e.g., reactivity for human and mouse TNF, human and mouse IL-15, etc.) validation studies in the mouse CIA model may be conducted with “matched surrogate antibody” derived DVD-binding protein molecules; briefly, a DVD-binding protein based on two (or more) mouse target specific antibodies may be matched to the extent possible to the characteristics of the parental human or humanized antibodies used for human DVD-binding protein construction (similar affinity, similar neutralization potency, similar half-life etc.).

[0171] 4) Systemic Lupus Erythematosus (SLE)

[0172] The immunopathogenic hallmark of SLE is the polyclonal B cell activation, which leads to hyperglobulinemia, autoantibody production and immune complex formation. The fundamental abnormality appears to be the failure of T cells to suppress the forbidden B cell clones due to generalized T cell dysregulation. In addition, B and T-cell interaction is facilitated by several cytokines such as IL-10 as well as co-stimulatory molecules such as CD40 and CD40L, B7 and CD28 and CTLA-4, which initiate the second signal. These interactions together with impaired phagocytic clearance of immune complexes and apoptotic material, perpetuate the immune response with resultant tissue injury. SLE is considered to be a Th-2 driven disease with documented elevations in serum IL-4, IL-6, IL-10. DVD-binding proteins capable of binding one or more targets such as, for example IL-4, IL-6, IL-10, IFN-α, or TNF-α are also contemplated. Combination of targets discussed herein will enhance therapeutic efficacy for SLE which can be tested in a number of lupus preclinical models (see Peng (2004) Methods Mol. Med. 102:227-72). Based on the cross-reactivity of the parental antibodies for human and mouse othologues (e.g., reactivity for human and mouse CD20, human and mouse Interferon alpha etc.) validation studies in a mouse lupus model may be conducted with “matched surrogate antibody” derived DVD-binding protein molecules; briefly, a DVD-binding protein based two (or more) mouse target specific antibodies may be matched to the extent possible to the characteristics of the parental human or humanized antibodies used for human DVD-binding protein construction (similar affinity, similar neutralization potency, similar half-life etc.).

[0173] 5) Multiple Sclerosis

[0174] Multiple sclerosis (MS) is a complex human autoimmune-type disease with a predominantly unknown etiology Immunologic destruction of myelin basic protein (MBP) throughout the nervous system is the major pathology of multiple sclerosis. MS is a disease of complex pathologies, which involves infiltration by CD4+ and CD8+ T cells and of response within the central nervous system. Expression in the CNS of cytokines, reactive nitrogen species and costimulator molecules have all been described in MS. Of major consideration are immunological mechanisms that contribute to the development of autoimmunity. In particular, antigen expression, cytokine and leukocyte interactions, and regulatory T-cells, which help balance/modulate other T-cells such as Th1 and Th2 cells, are important areas for therapeutic target identification.

[0175] TWEAK is a member of the TNF family, constitutively expressed in the central nervous system (CNS), with pro-inflammatory, proliferative or apoptotic effects depending upon cell types. Its receptor, Fn14, is expressed in CNS by endothelial cells, reactive astrocytes and neurons. TWEAK and Fn14 mRNA expression increased in spinal cord during experimental autoimmune encephalomyelitis (EAE). Anti-TWEAK antibody treatment in myelin oligodendrocyte glycoprotein (MOG) induced EAE in C57BL/6 mice resulted in a reduction of disease severity and leukocyte infiltration when mice were treated after the priming phase.

[0176] In one embodiment DVD Ig molecules capable of binding one or more, for example two, targets such as, for example IL-12, TWEAK, IL-23, CXCL13, CD40, CD40L, IL-18, VEGF, VLA-4, TNF, CD45RB, CD200, IFNgamma, GM-CSF, FGF, C5, CD52, or CCR2 are provided. An embodiment includes a dual-specific anti-IL-12/TWEAK DVD Ig as a therapeutic agent beneficial for the treatment of MS.

[0177] Several animal models for assessing the usefulness of the DVD molecules to treat MS are known in the art Based on the cross-reactivity of the parental antibodies for human and animal species othologues (e.g., reactivity for human and mouse IL-12, human and mouse TWEAK etc.) validation studies in the mouse EAE model may be conducted with “matched surrogate antibody” derived DVD-binding protein molecules; briefly, a DVD-binding protein based on to (or more) mouse target specific antibodies may be matched to the extent possible to the characteristics of the parental human or humanized antibodies used for human DVD-binding protein construction (similar affinity, similar neutralization potency, similar half-life etc.). The same concept applies to animal models in other non-rodent species, where a “matched surrogate antibody” derived DVD-binding protein would be selected for the anticipated pharmacology and possibly safety studies. In addition to routine safety assessments of these target pairs specific tests for the degree of immunosuppression may be warranted and helpful in selecting the best target pairs (see Luster et al. (1994) Toxicol. 92(1-3)).

[0178] MS is however not only an immunologic disease but has a very important neurodegenerative component. Disease progression in MS is due to cumulative loss and damage of axons and the final disease scores of the patients are determined by these neurodegenerative processes (Compston and Coles (2008) Lancet 372:1502-1517; Trapp and Nave (2008) Annu. Rev. Neurosci. 31: 247-269). Several mechanisms might account for axonal damage in MS. Excessive release of the neurotransmitter glutamate with associated calcium-mediated neurotoxicity, nitric-oxide release and subsequent axon damage, loss of neurotrophic support, massive accumulation of repulsive or axon growth inhibitory molecules like RGM A, NOGO A, Semaphorins, Ephrins, may contribute to axon-directed neurodegeneration and loss of successful axon regeneration. Targeting in a single DVD-binding protein molecule neutralizing activities directed against components like RGM A, NOGO A, Semaphorins, Ephrins with neutralizing activities directed against pro-inflammatory cytokines like IL-12, TWEAK, IL-23, CXCL13, CD40, CD40L, IL-18, VEGF, VLA-4, TNF, CD45RB, CD200, IFNgamma, GM-CSF, FGF, C5, CD52, and CCR2 would enable the simultaneous focus on inflammation and neuroregeneration, a goal not yet achieved by any of the current therapeutic MS principles. Stimulating neuroregeneration can compensate the functional impairments caused by the massive axonal neurodegeneration observed in MS, making recovery of lost cerebral functions possible.

[0179] 6) Sepsis

[0180] The pathophysiology of sepsis is initiated by the outer membrane components of both gram-negative organisms (lipopolysaccharide [LPS], lipid A, endotoxin) and gram-positive organisms (lipoteichoic acid, peptidoglycan). These outer membrane components are able to bind to the CD14 receptor on the surface of monocytes. By virtue of the recently described toll-like receptors, a signal is then transmitted to the cell, leading to the eventual production of the proinflammatory cytokines tumor necrosis factor-alpha (TNF-alpha) and interleukin-1 (IL-1). Overwhelming inflammatory and immune responses are essential features of septic shock and play a central part in the pathogenesis of tissue damage, multiple organ failure, and death induced by sepsis. Cytokines, especially tumor necrosis factor (TNF) and interleukin (IL-1), have been shown to be mediators of septic shock. These cytokines have a direct toxic effect on tissues; they also activate phospholipase A2. These and other effects lead to increased concentrations of platelet-activating factor, promotion of nitric oxide synthase activity, promotion of tissue infiltration by neutrophils, and promotion of neutrophil activity.

[0181] The treatment of sepsis and septic shock remains a clinical conundrum, and recent prospective trials with biological response modifiers (i.e., anti-TNF, anti-MIF) aimed at the inflammatory response have shown only modest clinical benefit. Recently, interest has shifted toward therapies aimed at reversing the accompanying periods of immune suppression. In experimental animals, not only can treatment with inhibitors of apoptosis prevent lymphoid cell apoptosis; it may also improve outcome. Although clinical trials with anti-apoptotic agents remain distant due in large part to technical difficulties associated with their administration and tissue targeting, inhibition of lymphocyte apoptosis represents an attractive therapeutic target for the septic patient. Likewise, a dual-specific agent targeting both inflammatory mediator and a apoptotic mediator, may have added benefit. One embodiment pertains to DVD-binding proteins capable of binding one or more targets involved in sepsis, in an embodiment two targets, such as, for example TNF and IL-17. The efficacy of such DVD-binding protein for sepsis can be assessed in preclinical animal models known in the art (see Buras et al. (2005) Nat. Rev. Drug Discov. 4(10):854-65 and Calandra et al. (2000) Nat. Med. 6(2):164-70).

[0182] 7) Neurological Disorders

[0183] (a) Neurodegenerative Diseases

[0184] Neurodegenerative diseases are either chronic in which case they are usually age-dependent or acute (e.g., stroke, traumatic brain injury, spinal cord injury, etc.). These chronic neurodegenerative diseases represent a complex interaction between multiple cell types and mediators. Treatment strategies for such diseases are limited and mostly constitute either blocking inflammatory processes with non-specific anti-inflammatory agents (e.g., corticosteroids, COX inhibitors) or agents to prevent neuron loss and/or synaptic functions. These treatments fail to stop disease progression. Recent studies suggest that more targeted therapies such as antibodies to soluble A-b peptide (including the A-b oligomeric forms) can not only help stop disease progression but may help maintain memory and other cognitive functions as well. These preliminary observations suggest that specific therapies targeting more than one disease mediator (e.g., A-b and a pro-inflammatory cytokine such as TNF) may provide even better therapeutic efficacy for chronic neurodegenerative diseases than observed with targeting a single disease mechanism (e.g., soluble A-b alone).

[0185] The DVD-binding protein molecules provided herein can bind one or more targets involved in Chronic neurodegenerative diseases such as Alzheimers. Such targets include, but are not limited to, any mediator, soluble or cell surface, implicated in AD pathogenesis e.g., AGE (S100 A, amphoterin), pro-inflammatory cytokines (e.g., IL-1), chemokines (e.g., MCP 1), molecules that inhibit nerve regeneration (e.g., Nogo, RGM A), molecules that enhance neurite growth (neurotrophins) and molecules that can mediate transport at the blood brain barrier (e.g., transferrin receptor, insulin receptor or RAGE). The efficacy of DVD-binding protein molecules can be validated in pre-clinical animal models such as the transgenic mice that over-express amyloid precursor protein or RAGE and develop Alzheimer's disease-like symptoms. In addition, DVD-binding protein molecules can be constructed and tested for efficacy in the animal models and the best therapeutic DVD-binding protein can be selected for testing in human patients. DVD-binding protein molecules can also be employed for treatment of other neurodegenerative diseases such as Parkinson's disease. Alpha-Synuclein is involved in Parkinson's pathology. DVD-binding protein molecules capable of targeting alpha-synuclein and inflammatory mediators such as TNF, IL-1, MCP-1 can prove effective therapy for Parkinson's disease and are also embodiments.

[0186] Alternatively a DVD-binding protein capable of targeting alpha-synuclein and RGM A could not only halt the pathologic progress in the substantia nigra of Parkinson disease patients but could also result in regenerative growth of damaged neurites because RGM A has been recently shown to be strongly upregulated in this area in PD patients (Bossers et al. (2009) Brain Pathol. 19: 91-107).

[0187] (b) Neuronal Regeneration and Spinal Cord Injury

[0188] Despite an increase in knowledge of the pathologic mechanisms, spinal cord injury (SCI) is still a devastating condition and represents a medical indication characterized by a high medical need. No satisfying treatment exists and high dose bolus injection of methylprednisolone (MP) is the only used therapy within a narrow time window of 8 h post injury. This treatment, however, is only intended to prevent secondary injury without causing any significant functional recovery. It is heavily critisized for the lack of unequivocal efficacy and severe adverse effects, like immunosuppression with subsequent infections and severe histopathological muscle alterations. No other drugs, biologics or small molecules, stimulating the endogenous regenerative potential are approved, but promising treatment principles and drug candidates have shown efficacy in animal models of SCI in recent years and first promising clinical data have been presented just recently. To a large extent the lack of functional recovery in human SCI is caused by factors inhibiting neurite growth, at lesion sites, in scar tissue, in myelin as well as on injury-associated cells. Such factors are the myelin-associated proteins NogoA, OMgp and MAG, RGM A, the scar-associated CSPG (Chondroitin Sulfate Proteoglycans) and inhibitory factors on reactive astrocytes (some semaphorins and ephrins). However, at the lesion site not only growth inhibitory molecules are found but also neurite growth stimulating factors like neurotrophins, laminin, L1 and others. This ensemble of neurite growth inhibitory and growth promoting molecules may explain that blocking single factors, like NogoA or RGM A, resulted in significant functional recovery in rodent SCI models, because a reduction of the inhibitory influences could shift the balance from growth inhibition to growth promotion. However, recoveries observed with blocking a single neurite outgrowth inhibitory molecule were not complete. To achieve faster and more pronounced recoveries either blocking two neurite outgrowth inhibitory molecules e.g Nogo and RGM A, or blocking an neurite outgrowth inhibitory molecule and enhancing functions of a neurite outgrowth enhancing molecule e.g Nogo and neurotrophins, or blocking a neurite outgrowth inhibitory moleclule e.g., Nogo and a pro-inflammatory molecule e.g., TNF, may be desirable (see McGee et al., (2003) Trends Neurosci. 26:193).

[0189] In one aspect, DVD-binding proteins capable of binding target pairs such as NgR and RGM A; NogoA and RGM A; MAG and RGM A; OMGp and RGM A; RGM A and RGM B; RGM A and Semaphorin 3A; RGM A and Semaphorin 4; CSPGs and RGM A; aggrecan, midkine, neurocan, versican, phosphacan, Te38 and TNF-α; Aβ globulomer-specific antibodies combined with antibodies promoting dendrite & axon sprouting are provided. Dendrite pathology and axon damage, or neuritic dystrophy are a very early sign of AD and it is known that NOGO A restricts dendrite growth and that the other molecules associated with myelin and mentioned above e.g., RGM A, MAG, OMGp impair axonal regrowth. One can combine such type of ab with any of the SCI-candidate (myelin-proteins) Ab. Other DVD-binding protein targets may include any combination of NgR-p75, NgR-Troy, NgR-Nogo66 (Nogo), NgR-Lingo, Lingo-Troy, Lingo-p75, MAG or Omgp. Additionally, targets may also include any mediator, soluble or cell surface, implicated in inhibition of neurite e.g Nogo, Ompg, MAG, RGM A, semaphorins, ephrins, soluble A-b, pro-inflammatory cytokines (e.g., IL-1), chemokines (e.g., MIP 1a), molecules that inhibit nerve regeneration. The efficacy of anti-nogo/anti-RGM A or similar DVD-binding protein molecules can be validated in pre-clinical animal models of spinal cord injury. In addition, these DVD-binding protein molecules can be constructed and tested for efficacy in the animal models and the best therapeutic DVD-binding protein can be selected for testing in human patients. In addition, DVD-binding protein molecules can be constructed that target two distinct ligand binding sites on a single receptor e.g., Nogo receptor which binds three ligand Nogo, OMGp, and MAG and RAGE that binds A-b and S100 A. Furthermore, neurite outgrowth inihibitors e.g., nogo and nogo receptor, also play a role in preventing nerve regeneration in immunological diseases like multiple sclerosis. Inhibition of nogo-nogo receptor interaction has been shown to enhance recovery in animal models of multiple sclerosis. Therefore, DVD-binding protein molecules that can block the function of one immune mediator e.g., a cytokine like IL-12 and a neurite outgrowth inhibitor molecule e.g., nogo or RGM may offer faster and greater efficacy than blocking either an immune or an neurite outgrowth inhibitor molecule alone.

[0190] In general, antibodies do not cross the blood brain barrier (BBB) in an efficient and relevant manner. However, in certain neurologic diseases, e.g., stroke, traumatic brain injury, multiple sclerosis, etc., the BBB may be compromised and allows for increased penetration of DVD-binding proteins and antibodies into the brain. In other neurological conditions, where BBB leakage is not occurring, one may employ the targeting of endogenous transport systems, including carrier-mediated transporters such as glucose and amino acid carriers and receptor-mediated transcytosis-mediating cell structures/receptors at the vascular endothelium of the BBB, thus enabling trans-BBB transport of the DVD-binding protein. Structures at the BBB enabling such transport include but are not limited to the insulin receptor, transferrin receptor, LRP and RAGE. In addition, strategies enable the use of DVD-binding proteins also as shuttles to transport potential drugs into the CNS including low molecular weight drugs, nanoparticles and nucleic acids (Coloma et al. (2000) Pharm Res. 17(3):266-74; Boado et al. (2007) Bioconjug. Chem. 18(2):447-55).

[0191] 8) Oncological Disorders

[0192] Monoclonal antibody therapy has emerged as an important therapeutic modality for cancer (von Mehren et al. (2003) Annu. Rev. Med. 54:343-69). Antibodies may exert antitumor effects by inducing apoptosis, redirected cytotoxicity, interfering with ligand-receptor interactions, or preventing the expression of proteins that are critical to the neoplastic phenotype. In addition, antibodies can target components of the tumor microenvironment, perturbing vital structures such as the formation of tumor-associated vasculature. Antibodies can also target receptors whose ligands are growth factors, such as the epidermal growth factor receptor. The antibody thus inhibits natural ligands that stimulate cell growth from binding to targeted tumor cells. Alternatively, antibodies may induce an anti-idiotype network, complement-mediated cytotoxicity, or antibody-dependent cellular cytotoxicity (ADCC). The use of dual-specific antibody that targets two separate tumor mediators will likely give additional benefit compared to a mono-specific therapy.

[0193] IV) Pharmaceutical Compositions

[0194] Pharmaceutical compositions comprising a binding protein and a pharmaceutically acceptable carrier are provided. The pharmaceutical compositions comprising binding proteins provided herein are for use in, but not limited to, diagnosing, detecting, or monitoring a disorder, in preventing, treating, managing, or ameliorating of a disorder or one or more symptoms thereof, and/or in research. In a specific embodiment, a composition comprises one or more binding proteins provided herein. In another embodiment, the pharmaceutical composition comprises one or more binding proteins provided herein and one or more prophylactic or therapeutic agents other than binding proteins provided herein for treating a disorder. In an embodiment, the prophylactic or therapeutic agents known to be useful for or having been or currently being used in the prevention, treatment, management, or amelioration of a disorder or one or more symptoms thereof. In accordance with these embodiments, the composition may further comprise of a carrier, diluent or excipient.

[0195] The binding proteins provided herein can be incorporated into pharmaceutical compositions suitable for administration to a subject. Typically, the pharmaceutical composition comprises a binding protein provided herein and a pharmaceutically acceptable carrier. The term “pharmaceutically acceptable carrier” includes any and all solvents, dispersion media, coatings, antibacterial and antifungal agents, isotonic and absorption delaying agents, and the like that are physiologically compatible. Examples of pharmaceutically acceptable carriers include one or more of water, saline, phosphate buffered saline, dextrose, glycerol, ethanol and the like, as well as combinations thereof. In some embodiments, isotonic agents, for example, sugars, polyalcohols such as mannitol, sorbitol, or sodium chloride, are included in the composition. Pharmaceutically acceptable carriers may further comprise minor amounts of auxiliary substances such as wetting or emulsifying agents, preservatives or buffers, which enhance the shelf life or effectiveness of the antibody or antibody binding portion.

[0196] Various delivery systems are known and can be used to administer one or more antibodies provided herein or the combination of one or more antibodies provided herein and a prophylactic agent or therapeutic agent useful for preventing, managing, treating, or ameliorating a disorder or one or more symptoms thereof, e.g., encapsulation in liposomes, microparticles, microcapsules, recombinant cells capable of expressing the antibody or antibody fragment, receptor-mediated endocytosis (see, e.g., Wu and Wu (1987) J. Biol. Chem. 262:4429-4432), construction of a nucleic acid as part of a retroviral or other vector, etc. Methods of administering a prophylactic or therapeutic agent provided herein include, but are not limited to, parenteral administration (e.g., intradermal, intramuscular, intraperitoneal, intravenous and subcutaneous), epidurala administration, intratumoral administration, and mucosal administration (e.g., intranasal and oral routes). In addition, pulmonary administration can be employed, e.g., by use of an inhaler or nebulizer, and formulation with an aerosolizing agent. See, e.g., U.S. Pat. No. 6,019,968. In one embodiment, a binding protein provided herein, combination therapy, or a composition provided herein is administered using Alkermes AIR® pulmonary drug delivery technology (Alkermes, Inc., Cambridge, Mass.). In a specific embodiment, prophylactic or therapeutic agents provided herein are administered intramuscularly, intravenously, intratumorally, orally, intranasally, pulmonary, or subcutaneously. The prophylactic or therapeutic agents may be administered by any convenient route, for example by infusion or bolus injection, by absorption through epithelial or mucocutaneous linings (e.g., oral mucosa, rectal and intestinal mucosa, etc.) and may be administered together with other biologically active agents. Administration can be systemic or local.

[0197] In an embodiment, specific binding of antibody-coupled carbon nanotubes (CNTs) to tumor cells in vitro, followed by their highly specific ablation with near-infrared (NIR) light can be used to target tumor cells. For example, biotinylated polar lipids can be used to prepare stable, biocompatible, noncytotoxic CNT dispersions that are then attached to one or two different neutralite avidin-derivatized DVD-binding proteins directed against one or more tumor antigens (e.g., CD22) (Chakravarty et al. (2008) Proc. Natl. Acad. Sci. USA 105:8697-8702.

[0198] In a specific embodiment, it may be desirable to administer the prophylactic or therapeutic agents provided herein locally to the area in need of treatment; this may be achieved by, for example, and not by way of limitation, local infusion, by injection, or by means of an implant, the implant being of a porous or non-porous material, including membranes and matrices, such as sialastic membranes, polymers, fibrous matrices (e.g., Tissuel®), or collagen matrices. In one embodiment, an effective amount of one or more antibodies provided herein antagonists is administered locally to the affected area to a subject to prevent, treat, manage, and/or ameliorate a disorder or a symptom thereof. In another embodiment, an effective amount of one or more antibodies provided herein is administered locally to the affected area in combination with an effective amount of one or more therapies (e.g., one or more prophylactic or therapeutic agents) other than a binding protein provided herein to a subject to prevent, treat, manage, and/or ameliorate a disorder or one or more symptoms thereof.

[0199] In another embodiment, the prophylactic or therapeutic agent can be delivered in a controlled release or sustained release system. In one embodiment, a pump may be used to achieve controlled or sustained release (see Langer, supra; Sefton (1987) CRC Crit. Ref. Biomed. Eng. 14:20; Buchwald et al. (1980) Surgery 88:507; Saudek et al. (1989) N. Engl. J. Med. 321:574). In another embodiment, polymeric materials can be used to achieve controlled or sustained release of the therapies. In an embodiment, the polymer used in a sustained release formulation is inert, free of leachable impurities, stable on storage, sterile, and biodegradable. In yet another embodiment, a controlled or sustained release system can be placed in proximity of the prophylactic or therapeutic target, thus requiring only a fraction of the systemic dose (see, e.g., Goodson, in Medical Applications of Controlled Release, supra, vol. 2, pp. 115-138 (1984)).

[0200] Controlled release systems are discussed in the review by Langer (1990) Science 249:1527-1533). Any technique known to one of skill in the art can be used to produce sustained release formulations comprising one or more therapeutic agents provided herein.

[0201] In a specific embodiment, where the composition is a nucleic acid encoding a prophylactic or therapeutic agent, the nucleic acid can be administered in vivo to promote expression of its encoded prophylactic or therapeutic agent, by constructing it as part of an appropriate nucleic acid expression vector and administering it so that it becomes intracellular, e.g., by use of a retroviral vector (see U.S. Pat. No. 4,980,286), or by direct injection, or by use of microparticle bombardment (e.g., a gene gun; Biolistic, Dupont), or coating with lipids or cell-surface receptors or transfecting agents, or by administering it in linkage to a homeobox-like peptide which is known to enter the nucleus (see, e.g., Joliot et al. (1991) Proc. Natl. Acad. Sci. USA 88:1864-1868). Alternatively, a nucleic acid can be introduced intracellularly and incorporated within host cell DNA for expression by homologous recombination.

[0202] A pharmaceutical composition provided herein is formulated to be compatible with its intended route of administration. Where useful, the composition may also include a solubilizing agent and a local anesthetic such as lignocamne to ease pain at the site of the injection.

[0203] The method may comprise administration of a composition formulated for parenteral administration by injection (e.g., by bolus injection or continuous infusion). Formulations for injection may be presented in unit dosage form (e.g., in ampoules or in multi-dose containers) with an added preservative. The compositions may take such forms as suspensions, solutions or emulsions in oily or aqueous vehicles, and may contain formulatory agents such as suspending, stabilizing and/or dispersing agents. Alternatively, the active ingredient may be in powder form for constitution with a suitable vehicle (e.g., sterile pyrogen-free water) before use.

[0204] The methods provided herein may additionally comprise of administration of compositions formulated as depot preparations. Such long acting formulations may be administered by implantation (e.g., subcutaneously or intramuscularly) or by intramuscular injection. Thus, for example, the compositions may be formulated with suitable polymeric or hydrophobic materials (e.g., as an emulsion in an acceptable oil) or ion exchange resins, or as sparingly soluble derivatives (e.g., as a sparingly soluble salt).

[0205] The methods provided herein encompasse administration of compositions formulated as neutral or salt forms. Pharmaceutically acceptable salts include those formed with anions such as those derived from hydrochloric, phosphoric, acetic, oxalic, tartaric acids, etc., and those formed with cations such as those derived from sodium, potassium, ammonium, calcium, ferric hydroxides, isopropylamine, triethylamine, 2-ethylamino ethanol, histidine, procaine, etc.

[0206] Generally, the ingredients of compositions are supplied either separately or mixed together in unit dosage form, for example, as a dry lyophilized powder or water free concentrate in a hermetically sealed container such as an ampoule or sachette indicating the quantity of active agent. Where the mode of administration is infusion, composition can be dispensed with an infusion bottle containing sterile pharmaceutical grade water or saline. Where the mode of administration is by injection, an ampoule of sterile water for injection or saline can be provided so that the ingredients may be mixed prior to administration.

[0207] In one embodiment, one or more of the prophylactic or therapeutic agents, or pharmaceutical compositions provided herein is packaged in a hermetically sealed container such as an ampoule or sachette indicating the quantity of the agent. In one embodiment, one or more of the prophylactic or therapeutic agents, or pharmaceutical compositions provided herein is supplied as a dry sterilized lyophilized powder or water free concentrate in a hermetically sealed container and can be reconstituted (e.g., with water or saline) to the appropriate concentration for administration to a subject. In an embodiment, one or more of the prophylactic or therapeutic agents or pharmaceutical compositions provided herein is supplied as a dry sterile lyophilized powder in a hermetically sealed container at a unit dosage of at least 5 mg, at least 10 mg, at least 15 mg, at least 25 mg, at least 35 mg, at least 45 mg, at least 50 mg, at least 75 mg, or at least 100 mg. The lyophilized prophylactic or therapeutic agents or pharmaceutical compositions provided herein may be stored at between 2° C. and 8° C. in its original container and the prophylactic or therapeutic agents, or pharmaceutical compositions provided herein may be administered within 1 week, e.g., within 5 days, within 72 hours, within 48 hours, within 24 hours, within 12 hours, within 6 hours, within 5 hours, within 3 hours, or within 1 hour after being reconstituted. In an alternative embodiment, one or more of the prophylactic or therapeutic agents or pharmaceutical compositions provided herein is supplied in liquid form in a hermetically sealed container indicating the quantity and concentration of the agent. In an embodiment, the liquid form of the administered composition is supplied in a hermetically sealed container at least 0.25 mg/ml, at least 0.5 mg/ml, at least 1 mg/ml, at least 2.5 mg/ml, at least 5 mg/ml, at least 8 mg/ml, at least 10 mg/ml, at least 15 mg/kg, at least 25 mg/ml, at least 50 mg/ml, at least 75 mg/ml or at least 100 mg/ml. The liquid form may be stored at between 2° C. and 8° C. in its original container.

[0208] The binding proteins provided herein can be incorporated into a pharmaceutical composition suitable for parenteral administration. In an embodiment, the antibody or antibody-portions will be prepared as an injectable solution containing 0.1-250 mg/ml binding protein. The injectable solution can be composed of either a liquid or lyophilized dosage form in a flint or amber vial, ampule or pre-filled syringe. The buffer can be L-histidine (1-50 mM), optimally 5-10 mM, at pH 5.0 to 7.0 (optimally pH 6.0). Other suitable buffers include but are not limited to, sodium succinate, sodium citrate, sodium phosphate or potassium phosphate. Sodium chloride can be used to modify the toxicity of the solution at a concentration of 0-300 mM (optimally 150 mM for a liquid dosage form). Cryoprotectants can be included for a lyophilized dosage form, principally 0-10% sucrose (optimally 0.5-1.0%). Other suitable cryoprotectants include trehalose and lactose. Bulking agents can be included for a lyophilized dosage form, principally 1-10% mannitol (optimally 2-4%). Stabilizers can be used in both liquid and lyophilized dosage forms, principally 1-50 mM L-Methionine (optimally 5-10 mM). Other suitable bulking agents include glycine, arginine, can be included as 0-0.05% polysorbate-80 (optimally 0.005-0.01%). Additional surfactants include but are not limited to polysorbate 20 and BRU surfactants. The pharmaceutical composition comprising the binding proteins provided herein prepared as an injectable solution for parenteral administration, can further comprise an agent useful as an adjuvant, such as those used to increase the absorption, or dispersion of a therapeutic protein (e.g., antibody). A particularly useful adjuvant is hyaluronidase, such as Hylenex® (recombinant human hyaluronidase). Addition of hyaluronidase in the injectable solution improves human bioavailability following parenteral administration, particularly subcutaneous administration. It also allows for greater injection site volumes (i.e. greater than 1 ml) with less pain and discomfort, and minimum incidence of injection site reactions. (see WO2004078140 and US2006104968).

[0209] The compositions provided herein may be in a variety of forms. These include, for example, liquid, semi-solid and solid dosage forms, such as liquid solutions (e.g., injectable and infusible solutions), dispersions or suspensions, tablets, pills, powders, liposomes and suppositories. The form chosen depends on the intended mode of administration and therapeutic application. Typical compositions are in the form of injectable or infusible solutions, such as compositions similar to those used for passive immunization of humans with other antibodies. The chosen mode of administration is parenteral (e.g., intravenous, subcutaneous, intraperitoneal, intramuscular). In an embodiment, the antibody is administered by intravenous infusion or injection. In another embodiment, the antibody is administered by intramuscular or subcutaneous injection.

[0210] Therapeutic compositions typically must be sterile and stable under the conditions of manufacture and storage. The composition can be formulated as a solution, microemulsion, dispersion, liposome, or other ordered structure suitable to high drug concentration. Sterile injectable solutions can be prepared by incorporating the active compound (i.e., antibody or antibody binding portion) in the required amount in an appropriate solvent with one or a combination of ingredients enumerated herein, as required, followed by filtered sterilization. Generally, dispersions are prepared by incorporating the active compound into a sterile vehicle that contains a basic dispersion medium and the required other ingredients from those enumerated herein. In the case of sterile, lyophilized powders for the preparation of sterile injectable solutions, the methods of preparation are vacuum drying and spray-drying that yields a powder of the active ingredient plus any additional desired ingredient from a previously sterile-filtered solution thereof. The proper fluidity of a solution can be maintained, for example, by the use of a coating such as lecithin, by the maintenance of the required particle size in the case of dispersion and by the use of surfactants. Prolonged absorption of injectable compositions can be brought about by including, in the composition, an agent that delays absorption, for example, monostearate salts and gelatin.

[0211] The binding proteins provided herein can be administered by a variety of methods known in the art, although for many therapeutic applications, in an embodiment, the route/mode of administration is subcutaneous injection, intravenous injection or infusion. As will be appreciated by the skilled artisan, the route and/or mode of administration will vary depending upon the desired results. In certain embodiments, the active compound may be prepared with a carrier that will protect the compound against rapid release, such as a controlled release formulation, including implants, transdermal patches, and microencapsulated delivery systems. Biodegradable, biocompatible polymers can be used, such as ethylene vinyl acetate, polyanhydrides, polyglycolic acid, collagen, polyorthoesters, and polylactic acid. Many methods for the preparation of such formulations are patented or generally known to those skilled in the art. See, e.g., Sustained and Controlled Release Drug Delivery Systems, J. R. Robinson, ed., Marcel Dekker, Inc., New York, 1978.

[0212] Supplementary active compounds can also be incorporated into the compositions. In certain embodiments, a binding protein provided herein is coformulated with and/or coadministered with one or more additional therapeutic agents that are useful for treating disorders with a binding protein provided herein. For example, a binding protein provided herein may be coformulated and/or coadministered with one or more additional antibodies that bind other targets (e.g., antibodies that bind other cytokines or that bind cell surface molecules). Furthermore, one or more antibodies provided herein may be used in combination with two or more of the foregoing therapeutic agents. Such combination therapies may advantageously utilize lower dosages of the administered therapeutic agents, thus avoiding possible toxicities or complications associated with the various monotherapies.

[0213] In certain embodiments, a binding protein is linked to a half-life extending vehicle known in the art. Such vehicles include, but are not limited to, the Fc domain, polyethylene glycol, and dextran. Such vehicles are described, e.g., in U.S. application Ser. No. 09/428,082 and PCT Publication No. WO 99/25044.

[0214] In a specific embodiment, nucleic acid sequences encoding a binding protein provided herein or another prophylactic or therapeutic agent provided herein are administered to treat, prevent, manage, or ameliorate a disorder or one or more symptoms thereof by way of gene therapy. Gene therapy refers to therapy performed by the administration to a subject of an expressed or expressible nucleic acid. In this embodiment, the nucleic acids produce their encoded antibody or prophylactic or therapeutic agent provided herein that mediates a prophylactic or therapeutic effect.

[0215] Any of the methods for gene therapy available in the art can be used in the methods provided herein. For general reviews of the methods of gene therapy, see Goldspiel et al., 1993. Methods commonly known in the art of recombinant DNA technology which can be used are described in Ausubel et al. (eds.), Current Protocols in Molecular Biology, John Wiley &Sons, NY (1993); and Kriegler, Gene Transfer and Expression, A Laboratory Manual, Stockton Press, NY (1990). Detailed description of various methods of gene therapy are disclosed in US Patent Publication No. U520050042664.

[0216] A method for treating a human subject suffering from a disorder in which the target, or targets, capable of being bound by the binding protein disclosed herein is detrimental, comprising administering to the human subject a binding protein disclosed herein such that the activity of the target, or targets in the human subject is inhibited and one of more symptoms is alleviated or treatment is achieved is provided. In an embodiment, diseases that can be treated or diagnosed with the compositions and methods include, but are not limited to, immune and inflammatory elements, such as autoimmune diseases, particularly those assocated with inflammation, including Crohn's disease, psoriasis (including plaque psoriasis), arthritis (including rheumatoid arthritis, psoratic arthritis, osteoarthritis, or juvenile idiopathic arthritis), multiple sclerosis, ankylosing spondylitis, systemic lupus erythematosus, multiple sclerosis, sepsis, and neurodegenerative diseases, neuronal regeneration, spinal cord injury, and primary and metastatic cancers. In another embodiment, the disorder is a respiratory disorder; asthma; allergic and nonallergic asthma; asthma due to infection; asthma due to infection with respiratory syncytial virus (RSV); chronic obstructive pulmonary disease (COPD); a condition involving airway inflammation; eosinophilia; fibrosis and excess mucus production; cystic fibrosis; pulmonary fibrosis; an atopic disorder; atopic dermatitis; urticaria; eczema; allergic rhinitis; allergic enterogastritis; an inflammatory and/or autoimmune condition of the skin; an inflammatory and/or autoimmune condition of gastrointestinal organs; inflammatory bowel diseases (IBD); ulcerative colitis; an inflammatory and/or autoimmune condition of the liver; liver cirrhosis; liver fibrosis; liver fibrosis caused by hepatitis B and/or C virus; scleroderma; tumors or cancers; hepatocellular carcinoma; glioblastoma; lymphoma; Hodgkin's lymphoma; a viral infection; a bacterial infection; a parasitic infection; HTLV-1 infection; suppression of expression of protective type 1 immune responses, and suppression of expression of a protective type 1 immune response during vaccination.

[0217] A binding protein provided herein also can be administered with one or more additional therapeutic agents useful in the treatment of various diseases.

[0218] A binding protein provided herein can be used alone or in combination to treat such diseases. It should be understood that the binding proteins can be used alone or in combination with an additional agent, e.g., a therapeutic agent, the additional agent being selected by the skilled artisan for its intended purpose. For example, the additional agent can be a therapeutic agent art-recognized as being useful to treat the disease or condition being treated by the antibody provided herein. The additional agent also can be an agent that imparts a beneficial attribute to the therapeutic composition e.g., an agent which effects the viscosity of the composition.

[0219] It should further be understood that the combinations provided herein are those combinations useful for their intended purpose. The agents set forth below are illustrative for purposes and not intended to be limited. In some embodiments, the combinations comprise the antibodies provided herein and at least one additional agent selected from the lists below. The combination can also include more than one additional agent, e.g., two or three additional agents if the combination is such that the formed composition can perform its intended function.

[0220] The pharmaceutical compositions provided herein may include a “therapeutically effective amount” or a “prophylactically effective amount” of a binding protein provided herein. A “therapeutically effective amount” refers to an amount effective, at dosages and for periods of time necessary, to achieve the desired therapeutic result. A therapeutically effective amount of the binding protein may be determined by a person skilled in the art and may vary according to factors such as the disease state, age, sex, and weight of the individual, and the ability of the binding protein to elicit a desired response in the individual. A therapeutically effective amount is also one in which any toxic or detrimental effects of the antibody, or antibody binding portion, are outweighed by the therapeutically beneficial effects. A “prophylactically effective amount” refers to an amount effective, at dosages and for periods of time necessary, to achieve the desired prophylactic result. Typically, since a prophylactic dose is used in subjects prior to or at an earlier stage of disease, the prophylactically effective amount will be less than the therapeutically effective amount.

[0221] Dosage regimens may be adjusted to provide the optimum desired response (e.g., a therapeutic or prophylactic response). For example, a single bolus may be administered, several divided doses may be administered over time or the dose may be proportionally reduced or increased as indicated by the exigencies of the therapeutic situation. It is especially advantageous to formulate parenteral compositions in dosage unit form for ease of administration and uniformity of dosage. The term “dosage unit form” refers to physically discrete units suited as unitary dosages for the mammalian subjects to be treated; each unit containing a predetermined quantity of active compound calculated to produce the desired therapeutic effect in association with the required pharmaceutical carrier. The specification for the dosage unit forms provided herein are dictated by and directly dependent on (a) the unique characteristics of the active compound and the particular therapeutic or prophylactic effect to be achieved, and (b) the limitations inherent in the art of compounding such an active compound for the treatment of sensitivity in individuals.

[0222] An exemplary, non-limiting range for a therapeutically or prophylactically effective amount of a binding protein provided herein is 0.1-20 mg/kg, for example, 1-10 mg/kg. It is to be noted that dosage values may vary with the type and severity of the condition to be alleviated. It is to be further understood that for any particular subject, specific dosage regimens may be adjusted over time according to the individual need and the professional judgment of the person administering or supervising the administration of the compositions, and that dosage ranges set forth herein are exemplary only and are not intended to limit the scope or practice of the claimed composition.

[0223] V) Diagnostics

[0224] The disclosure herein also provides diagnostic applications. This is further elucidated below.

[0225] A. Method of Assay

[0226] The present disclosure also provides a method for determining the presence, amount or concentration of an analyte (or a fragment thereof) in a test sample using at least one DVD-binding protein as described herein. Any suitable assay as is known in the art can be used in the method. Examples include, but are not limited to, immunoassay, such as sandwich immunoassay (e.g., monoclonal, polyclonal and/or DVD-binding protein sandwich immunoassays or any variation thereof (e.g., monoclonal/DVD-binding protein, DVD-binding protein/polyclonal, etc.), including radioisotope detection (radioimmunoassay (RIA)) and enzyme detection (enzyme immunoassay (EIA) or enzyme-linked immunosorbent assay (ELISA) (e.g., Quantikine ELISA assays, R&D Systems, Minneapolis, Minn.))), competitive inhibition immunoassay (e.g., forward and reverse), fluorescence polarization immunoassay (FPIA), enzyme multiplied immunoassay technique (EMIT), bioluminescence resonance energy transfer (BRET), and homogeneous chemiluminescent assay, etc. In a SELDI-based immunoassay, a capture reagent that specifically binds an analyte (or a fragment thereof) of interest is attached to the surface of a mass spectrometry probe, such as a pre-activated protein chip array. The analyte (or a fragment thereof) is then specifically captured on the biochip, and the captured analyte (or a fragment thereof) is detected by mass spectrometry. Alternatively, the analyte (or a fragment thereof) can be eluted from the capture reagent and detected by traditional MALDI (matrix-assisted laser desorption/ionization) or by SELDI. A chemiluminescent microparticle immunoassay, in particular one employing the ARCHITECT® automated analyzer (Abbott Laboratories, Abbott Park, Ill.), is an example of a preferred immunoassay.

[0227] Methods well-known in the art for collecting, handling and processing urine, blood, serum and plasma, and other body fluids, are used in the practice of the present disclosure, for instance, when a DVD-binding protein as described herein is employed as an immunodiagnostic reagent and/or in an analyte immunoassay kit. The test sample can comprise further moieties in addition to the analyte of interest, such as antibodies, antigens, haptens, hormones, drugs, enzymes, receptors, proteins, peptides, polypeptides, oligonucleotides and/or polynucleotides. For example, the sample can be a whole blood sample obtained from a subject. It can be necessary or desired that a test sample, particularly whole blood, be treated prior to immunoassay as described herein, e.g., with a pretreatment reagent. Even in cases where pretreatment is not necessary (e.g., most urine samples), pretreatment optionally can be done (e.g., as part of a regimen on a commercial platform).

[0228] The pretreatment reagent can be any reagent appropriate for use with the immunoassay and kits provided herein. The pretreatment optionally comprises: (a) one or more solvents (e.g., methanol and ethylene glycol) and optionally, salt, (b) one or more solvents and salt, and optionally, detergent, (c) detergent, or (d) detergent and salt. Pretreatment reagents are known in the art, and such pretreatment can be employed, e.g., as used for assays on Abbott TDx, AxSYM®, and ARCHITECT® analyzers (Abbott Laboratories, Abbott Park, Ill.), as described in the literature (see, e.g., Yatscoff et al. (1990) Clin. Chem. 36:1969-1973 and Wallemacq et al. (1999) Clin. Chem. 45: 432-435), and/or as commercially available. Additionally, pretreatment can be done as described in U.S. Pat. Nos. 5,135,875 and 6,660,843; European Patent Publication No. EU0471293, US Patent Application No. 20080020401. The pretreatment reagent can be a heterogeneous agent or a homogeneous agent.

[0229] With use of a heterogeneous pretreatment reagent, the pretreatment reagent precipitates analyte binding protein (e.g., protein that can bind to an analyte or a fragment thereof) present in the sample. Such a pretreatment step comprises removing any analyte binding protein by separating from the precipitated analyte binding protein the supernatant of the mixture formed by addition of the pretreatment agent to sample. In such an assay, the supernatant of the mixture absent any binding protein is used in the assay, proceeding directly to the antibody capture step.

[0230] With use of a homogeneous pretreatment reagent there is no such separation step. The entire mixture of test sample and pretreatment reagent are contacted with a labeled specific binding partner for analyte (or a fragment thereof), such as a labeled anti-analyte antibody (or an antigenically reactive fragment thereof). The pretreatment reagent employed for such an assay typically is diluted in the pretreated test sample mixture, either before or during capture by the first specific binding partner. Despite such dilution, a certain amount of the pretreatment reagent is still present (or remains) in the test sample mixture during capture. In one embodiment, the labeled specific binding partner can be a DVD-binding protein (or a fragment, a variant, or a fragment of a variant thereof).

[0231] In a heterogeneous format, after the test sample is obtained from a subject, a first mixture is prepared. The mixture contains the test sample being assessed for an analyte (or a fragment thereof) and a first specific binding partner, wherein the first specific binding partner and any analyte contained in the test sample form a first specific binding partner-analyte complex. Preferably, the first specific binding partner is an anti-analyte antibody or a fragment thereof. The first specific binding partner can be a DVD-binding protein (or a fragment, a variant, or a fragment of a variant thereof) as described herein. The order in which the test sample and the first specific binding partner are added to form the mixture is not critical. Preferably, the first specific binding partner is immobilized on a solid phase. The solid phase used in the immunoassay (for the first specific binding partner and, optionally, the second specific binding partner) can be any solid phase known in the art, such as, but not limited to, a magnetic particle, a bead, a test tube, a microtiter plate, a cuvette, a membrane, a scaffolding molecule, a film, a filter paper, a disc and a chip.

[0232] After the mixture containing the first specific binding partner-analyte complex is formed, any unbound analyte is removed from the complex using any technique known in the art. For example, the unbound analyte can be removed by washing. Desirably, however, the first specific binding partner is present in excess of any analyte present in the test sample, such that all analyte that is present in the test sample is bound by the first specific binding partner.

[0233] After any unbound analyte is removed, a second specific binding partner is added to the mixture to form a first specific binding partner-analyte-second specific binding partner complex. The second specific binding partner is preferably an anti-analyte antibody that binds to an epitope on analyte that differs from the epitope on analyte bound by the first specific binding partner. Moreover, also preferably, the second specific binding partner is labeled with or contains a detectable label as described above. The second specific binding partner can be a DVD-binding protein (or a fragment, a variant, or a fragment of a variant thereof) as described herein.

[0234] Any suitable detectable label as is known in the art can be used. For example, the detectable label can be a radioactive label (such as ³H, ¹²⁵I, ³⁵S, ¹⁴C, ³²P, and ³³P), an enzymatic label (such as horseradish peroxidase, alkaline peroxidase, glucose 6-phosphate dehydrogenase, and the like), a chemiluminescent label (such as acridinium esters, thioesters, or sulfonamides; luminol, isoluminol, phenanthridinium esters, and the like), a fluorescent label (such as fluorescein (e.g., 5-fluorescein, 6-carboxyfluorescein, 3′6-carboxyfluorescein, 5(6)-carboxyfluorescein, 6-hexachloro-fluorescein, 6-tetrachlorofluorescein, fluorescein isothiocyanate, and the like)), rhodamine, phycobiliproteins, R-phycoerythrin, quantum dots (e.g., zinc sulfide-capped cadmium selenide), a thermometric label, or an immuno-polymerase chain reaction label. An introduction to labels, labeling procedures and detection of labels is found in Polak and Van Noorden, Introduction to Immunocytochemistry, 2^{nd} ed., Springer Verlag, N.Y. (1997), and in Haugland, Handbook of Fluorescent Probes and Research Chemicals (1996), which is a combined handbook and catalogue published by Molecular Probes, Inc., Eugene, Oreg. A fluorescent label can be used in FPIA (see, e.g., U.S. Pat. No. 5,593,896). An acridinium compound can be used as a detectable label in a homogeneous or heterogeneous chemiluminescent assay (see, e.g., Adamczyk et al. (2006) Bioorg. Med. Chem. Lett. 16: 1324-1328).

[0235] A preferred acridinium compound is an acridinium-9-carboxamide. Methods for preparing acridinium 9-carboxamides are described in e.g. Mattingly (1991) J. Biolumin. Chemilumin. 6: 107-114. Another preferred acridinium compound is an acridinium-9-carboxylate aryl ester. An example of an acridinium-9-carboxylate aryl ester is 10-methyl-9-(phenoxycarbonyl)acridinium fluorosulfonate (available from Cayman Chemical, Ann Arbor, Mich.). Methods for preparing acridinium 9-carboxylate aryl esters are described in e.g. McCapra et al. (1965) Photochem. Photobiol. 4: 1111-21. Further details regarding acridinium-9-carboxylate aryl ester and its use are set forth in US Patent Publication No. 20080248493.

[0236] Chemiluminescent assays (e.g., using acridinium as described above or other chemiluminescent agents) can be performed in accordance with the methods described in Adamczyk et al. (2006) Anal. Chim Acta 579(1): 61-67. While any suitable assay format can be used, a microplate chemiluminometer (Mithras LB-940, Berthold Technologies U.S.A., LLC, Oak Ridge, Tenn.) enables the assay of multiple samples of small volumes rapidly.

[0237] The order in which the test sample and the specific binding partner(s) are added to form the mixture for chemiluminescent assay is not critical. If the first specific binding partner is detectably labeled with a chemiluminescent agent such as an acridinium compound, detectably labeled first specific binding partner-analyte complexes form. Alternatively, if a second specific binding partner is used and the second specific binding partner is detectably labeled with a chemiluminescent agent such as an acridinium compound, detectably labeled first specific binding partner-analyte-second specific binding partner complexes form. Any unbound specific binding partner, whether labeled or unlabeled, can be removed from the mixture using any technique known in the art, such as washing.

[0238] Hydrogen peroxide can be generated in situ in the mixture or provided or supplied to the mixture (e.g., the source of the hydrogen peroxide being one or more buffers or other solutions that are known to contain hydrogen peroxide) before, simultaneously with, or after the addition of an above-described acridinium compound. Hydrogen peroxide can be generated in situ in a number of ways such as would be apparent to one skilled in the art.

[0239] Upon the simultaneous or subsequent addition of at least one basic solution to the sample, a detectable signal, namely, a chemiluminescent signal, indicative of the presence of analyte is generated. The basic solution contains at least one base and has a pH greater than or equal to 10, preferably, greater than or equal to 12. Examples of basic solutions include, but are not limited to, sodium hydroxide, potassium hydroxide, calcium hydroxide, ammonium hydroxide, magnesium hydroxide, sodium carbonate, sodium bicarbonate, calcium hydroxide, calcium carbonate, and calcium bicarbonate. The amount of basic solution added to the sample depends on the concentration of the basic solution. Based on the concentration of the basic solution used, one skilled in the art can easily determine the amount of basic solution to add to the sample.

[0240] The chemiluminescent signal that is generated can be detected using routine techniques known to those skilled in the art. Based on the intensity of the signal generated, the amount of analyte in the sample can be quantified. Specifically, the amount of analyte in the sample is proportional to the intensity of the signal generated. The amount of analyte present can be quantified by comparing the amount of light generated to a standard curve for analyte or by comparison to a reference standard. The standard curve can be generated using serial dilutions or solutions of known concentrations of analyte by mass spectroscopy, gravimetric methods, and other techniques known in the art. While the above is described with emphasis on use of an acridinium compound as the chemiluminescent agent, one of ordinary skill in the art can readily adapt this description for use of other chemiluminescent agents.

[0241] Analyte immunoassays generally can be conducted using any format known in the art, such as, but not limited to, a sandwich format. Specifically, in one immunoassay format, at least two antibodies are employed to separate and quantify analyte, such as human analyte, or a fragment thereof in a sample. More specifically, the at least two antibodies bind to different epitopes on an analyte (or a fragment thereof) forming an immune complex, which is referred to as a “sandwich.” Generally, in the immunoassays one or more antibodies can be used to capture the analyte (or a fragment thereof) in the test sample (these antibodies are frequently referred to as a “capture” antibody or “capture” antibodies) and one or more antibodies can be used to bind a detectable (namely, quantifiable) label to the sandwich (these antibodies are frequently referred to as the “detection antibody,” the “detection antibodies,” the “conjugate,” or the “conjugates”). Thus, in the context of a sandwich immunoassay format, a binding protein or a DVD-binding protein (or a fragment, a variant, or a fragment of a variant thereof) as described herein can be used as a capture antibody, a detection antibody, or both. For example, one binding protein or DVD-binding protein having a domain that can bind a first epitope on an analyte (or a fragment thereof) can be used as a capture agent and/or another binding protein or DVD-binding protein having a domain that can bind a second epitope on an analyte (or a fragment thereof) can be used as a detection agent. In this regard, a binding protein or a DVD-binding protein having a first domain that can bind a first epitope on an analyte (or a fragment thereof) and a second domain that can bind a second epitope on an analyte (or a fragment thereof) can be used as a capture agent and/or a detection agent. Alternatively, one binding protein or DVD-binding protein having a first domain that can bind an epitope on a first analyte (or a fragment thereof) and a second domain that can bind an epitope on a second analyte (or a fragment thereof) can be used as a capture agent and/or a detection agent to detect, and optionally quantify, two or more analytes. In the event that an analyte can be present in a sample in more than one form, such as a monomeric form and a dimeric/multimeric form, which can be homomeric or heteromeric, one binding protein or DVD-binding protein having a domain that can bind an epitope that is only exposed on the monomeric form and another binding protein or DVD-binding protein having a domain that can bind an epitope on a different part of a dimeric/multimeric form can be used as capture agents and/or detection agents, thereby enabling the detection, and optional quantification, of different forms of a given analyte. Furthermore, employing binding proteins or DVD-binding proteins with differential affinities within a single binding protein or DVD-binding protein and/or between binding proteins or DVD-binding proteins can provide an avidity advantage. In the context of immunoassays as described herein, it generally may be helpful or desired to incorporate one or more linkers within the structure of a binding protein or a DVD-binding protein. When present, optimally the linker may be of sufficient length and structural flexibility to enable binding of an epitope by the inner domains as well as binding of another epitope by the outer domains. In this regard, when a binding protein or a DVD-binding protein can bind two different analytes and one analyte is larger than the other, desirably the larger analyte is bound by the outer domains.

[0242] Generally speaking, a sample being tested for (for example, suspected of containing) analyte (or a fragment thereof) can be contacted with at least one capture agent (or agent) and at least one detection agent (which can be a second detection agent or a third detection agent or even a successively numbered agent, e.g., as where the capture and/or detection agent comprises multiple agents) either simultaneously or sequentially and in any order. For example, the test sample can be first contacted with at least one capture agent and then (sequentially) with at least one detection agent. Alternatively, the test sample can be first contacted with at least one detection agent and then (sequentially) with at least one capture agent. In yet another alternative, the test sample can be contacted simultaneously with a capture agent and a detection agent.

[0243] In the sandwich assay format, a sample suspected of containing analyte (or a fragment thereof) is first brought into contact with at least one first capture agent under conditions that allow the formation of a first agent/analyte complex. If more than one capture agent is used, a first capture agent/analyte complex comprising two or more capture agents is formed. In a sandwich assay, the agents, i.e., preferably, the at least one capture agent, are used in molar excess amounts of the maximum amount of analyte (or a fragment thereof) expected in the test sample. For example, from about 5 μg to about 1 mg of agent per mL of buffer (e.g., microparticle coating buffer) can be used.

[0244] Competitive inhibition immunoassays, which are often used to measure small analytes because binding by only one antibody (i.e., a binding protein and/or a DVD-binding protein in the context of the present disclosure) is required, comprise sequential and classic formats. In a sequential competitive inhibition immunoassay a capture agent to an analyte of interest is coated onto a well of a microtiter plate or other solid support. When the sample containing the analyte of interest is added to the well, the analyte of interest binds to the capture agent. After washing, a known amount of labeled (e.g., biotin or horseradish peroxidase (HRP)) analyte capable of binding the capture antibody is added to the well. A substrate for an enzymatic label is used to generate a signal. An example of a suitable substrate for HRP is 3,3′,5,5′-tetramethylbenzidine (TMB). After washing, the signal generated by the labeled analyte is measured and is inversely proportional to the amount of analyte in the sample. In a classic competitive inhibition immunoassay typically an antibody (i.e., binding protein and/or a DVD-binding protein in the context of the present disclosure) to an analyte of interest is coated onto a solid support (e.g., a well of a microtiter plate). However, unlike the sequential competitive inhibition immunoassay, the sample and the labeled analyte are added to the well at the same time. Any analyte in the sample competes with labeled analyte for binding to the capture agent. After washing, the signal generated by the labeled analyte is measured and is inversely proportional to the amount of analyte in the sample. Of course, there are many variations of these formats, e.g., when binding to the solid support takes place, whether the format is one-step, two-step, delayed two-step, and the like, and these would be recognized by one of ordinary skill in the art.

[0245] Optionally, prior to contacting the test sample with the at least one capture agent (for example, the first capture agent), the at least one capture agent can be bound to a solid support, which facilitates the separation of the first agent/analyte (or a fragment thereof) complex from the test sample. The substrate to which the capture agent is bound can be any suitable solid support or solid phase that facilitates separation of the capture agent-analyte complex from the sample.

[0246] Examples include a well of a plate, such as a microtiter plate, a test tube, a porous gel (e.g., silica gel, agarose, dextran, or gelatin), a polymeric film (e.g., polyacrylamide), beads (e.g., polystyrene beads or magnetic beads), a strip of a filter/membrane (e.g., nitrocellulose or nylon), microparticles (e.g., latex particles, magnetizable microparticles (e.g., microparticles having ferric oxide or chromium oxide cores and homo- or hetero-polymeric coats and radii of about 1-10 microns). The substrate can comprise a suitable porous material with a suitable surface affinity to bind antigens and sufficient porosity to allow access by detection antibodies. A microporous material is generally preferred, although a gelatinous material in a hydrated state can be used. Such porous substrates are preferably in the form of sheets having a thickness of about 0.01 to about 0.5 mm, preferably about 0.1 mm. While the pore size may vary quite a bit, preferably the pore size is from about 0.025 to about 15 microns, more preferably from about 0.15 to about 15 microns. The surface of such substrates can be passively coated or activated by chemical processes that cause covalent linkage of an antibody to the substrate. Irreversible binding, generally by adsorption through hydrophobic forces, of the antigen or the antibody to the substrate results; alternatively, a chemical coupling agent or other means can be used to bind covalently the antibody to the substrate, provided that such binding does not interfere with the ability of the antibody to bind to analyte. Alternatively, the antibody (i.e., binding proteins and/or DVD-binding proteins in the context of the present disclosure) can be bound with microparticles, which have been previously coated with streptavidin (e.g., DYNAL® Magnetic Beads, Invitrogen, Carlsbad, Calif.) or biotin (e.g., using Power-Bind™-SA-MP streptavidin-coated microparticles (Seradyn, Indianapolis, Ind.)) or anti-species-specific monoclonal antibodies (i.e., binding proteins and/or DVD-binding proteins in the context of the present disclosure). If necessary or desired, the substrate (e.g., for the label) can be derivatized to allow reactivity with various functional groups on the antibody (i.e., binding proteins and/or DVD-binding proteins in the context of the present disclosure). Such derivatization requires the use of certain coupling agents, examples of which include, but are not limited to, maleic anhydride, N-hydroxysuccinimide, and 1-ethyl-3-(3-dimethylaminopropyl) carbodiimide. If desired, one or more capture agents, such as antibodies (or fragments thereof) (i.e., binding proteins and/or DVD-binding proteins in the context of the present disclosure, each of which is specific for analyte(s) can be attached to solid phases in different physical or addressable locations (e.g., such as in a biochip configuration (see, e.g., U.S. Pat. No. 6,225,047; PCT Publication No. WO 99/51773; U.S. Pat. No. 6,329,209; PCT Publication No. WO 00/56934, and U.S. Pat. No. 5,242,828). If the capture agent is attached to a mass spectrometry probe as the solid support, the amount of analyte bound to the probe can be detected by laser desorption ionization mass spectrometry. Alternatively, a single column can be packed with different beads, which are derivatized with the one or more capture agents, thereby capturing the analyte in a single place (see, antibody-derivatized, bead-based technologies, e.g., the xMAP technology of Luminex (Austin, Tex.)).

[0247] After the test sample being assayed for analyte (or a fragment thereof) is brought into contact with the at least one capture agent (for example, the first capture agent), the mixture is incubated in order to allow for the formation of a first capture agent (or multiple capture agent)-analyte (or a fragment thereof) complex. The incubation can be carried out at a pH of from about 4.5 to about 10.0, at a temperature of from about 2° C. to about 45° C., and for a period from at least about one (1) minute to about eighteen (18) hours, preferably from about 1 to about 24 minutes, most preferably for about 4 to about 18 minutes. The immunoassay described herein can be conducted in one step (meaning the test sample, at least one capture agent and at least one detection agent are all added sequentially or simultaneously to a reaction vessel) or in more than one step, such as two steps, three steps, etc.

[0248] After formation of the (first or multiple) capture agent/analyte (or a fragment thereof) complex, the complex is then contacted with at least one detection agent under conditions which allow for the formation of a (first or multiple) capture agent/analyte (or a fragment thereof)/second detection agent complex). While captioned for clarity as the “second” agent (e.g., second detection agent), in fact, where multiple agent are used for capture and/or detection, the at least one detection agent can be the second, third, fourth, etc. agents used in the immunoassay. If the capture agent/analyte (or a fragment thereof) complex is contacted with more than one detection agent, then a (first or multiple) capture agent/analyte (or a fragment thereof)/(multiple) detection agent complex is formed. As with the capture agent (e.g., the first capture agent), when the at least one (e.g., second and any subsequent) detection agent is brought into contact with the capture agent/analyte (or a fragment thereof) complex, a period of incubation under conditions similar to those described above is required for the formation of the (first or multiple) capture agent/analyte (or a fragment thereof)/(second or multiple) detection agent complex. Preferably, at least one detection agent contains a detectable label. The detectable label can be bound to the at least one detection agent (e.g., the second detection agent) prior to, simultaneously with, or after the formation of the (first or multiple) capture agent/analyte (or a fragment thereof)/(second or multiple) detection agent complex. Any detectable label known in the art can be used (see discussion above, including of the Polak and Van Noorden (1997) and Haugland (1996) references).

[0249] The detectable label can be bound to the antibodies either directly or through a coupling agent. An example of a coupling agent that can be used is EDAC (1-ethyl-3-(3-dimethylaminopropyl) carbodiimide, hydrochloride), which is commercially available from Sigma-Aldrich, St. Louis, Mo. Other coupling agents that can be used are known in the art. Methods for binding a detectable label to an antibody are known in the art. Additionally, many detectable labels can be purchased or synthesized that already contain end groups that facilitate the coupling of the detectable label to the agent, such as CPSP-Acridinium Ester (i.e., 9-[N-tosyl-N-(3-carboxypropyl)]-10-(3-sulfopropyl)acridinium carboxamide) or SPSP-Acridinium Ester (i.e., N10-(3-sulfopropyl)-N-(3-sulfopropyl)-acridinium-9-carboxamide).

[0250] The (first or multiple) capture agent/analyte/(second or multiple) detection agent complex can be, but does not have to be, separated from the remainder of the test sample prior to quantification of the label. For example, if the at least one capture agent (e.g., the first capture agent, such as a binding protein and/or a DVD-binding protein in accordance with the present disclosure) is bound to a solid support, such as a well or a bead, separation can be accomplished by removing the fluid (of the test sample) from contact with the solid support. Alternatively, if the at least first capture agent is bound to a solid support, it can be simultaneously contacted with the analyte-containing sample and the at least one second detection agent to form a first (multiple) agent/analyte/second (multiple) agent complex, followed by removal of the fluid (test sample) from contact with the solid support. If the at least one first capture agent is not bound to a solid support, then the (first or multiple) capture agent/analyte/(second or multiple) detection agent complex does not have to be removed from the test sample for quantification of the amount of the label.

[0251] After formation of the labeled capture agent/analyte/detection agent complex (e.g., the first capture agent/analyte/second detection agent complex), the amount of label in the complex is quantified using techniques known in the art. For example, if an enzymatic label is used, the labeled complex is reacted with a substrate for the label that gives a quantifiable reaction such as the development of color. If the label is a radioactive label, the label is quantified using appropriate means, such as a scintillation counter. If the label is a fluorescent label, the label is quantified by stimulating the label with a light of one color (which is known as the “excitation wavelength”) and detecting another color (which is known as the “emission wavelength”) that is emitted by the label in response to the stimulation. If the label is a chemiluminescent label, the label is quantified by detecting the light emitted either visually or by using luminometers, x-ray film, high speed photographic film, a CCD camera, etc. Once the amount of the label in the complex has been quantified, the concentration of analyte or a fragment thereof in the test sample is determined by appropriate means, such as by use of a standard curve that has been generated using serial dilutions of analyte or a fragment thereof of known concentration. Other than using serial dilutions of analyte or a fragment thereof, the standard curve can be generated gravimetrically, by mass spectroscopy and by other techniques known in the art.

[0252] In a chemiluminescent microparticle assay employing the ARCHITECT® analyzer, the conjugate diluent pH may be about 6.0+/−0.2, the microparticle coating buffer may be maintained at about room temperature (i.e., at from about 17 to about 27° C.), the microparticle coating buffer pH may be about 6.5+/−0.2, and the microparticle diluent pH may be about 7.8+/−0.2. Solids preferably are less than about 0.2%, such as less than about 0.15%, less than about 0.14%, less than about 0.13%, less than about 0.12%, or less than about 0.11%, such as about 0.10%.

[0253] FPIAs are based on competitive binding immunoassay principles. A fluorescently labeled compound, when excited by a linearly polarized light, will emit fluorescence having a degree of polarization inversely proportional to its rate of rotation. When a fluorescently labeled tracer-antibody complex is excited by a linearly polarized light, the emitted light remains highly polarized because the fluorophore is constrained from rotating between the time light is absorbed and the time light is emitted. When a “free” tracer compound (i.e., a compound that is not bound to an antibody) is excited by linearly polarized light, its rotation is much faster than the corresponding tracer-antibody conjugate (or tracer-binding protein and/or tracer-DVD-binding protein in accordance with the present disclosure) produced in a competitive binding immunoassay. FPIAs are advantageous over RIAs inasmuch as there are no radioactive substances requiring special handling and disposal. In addition, FPIAs are homogeneous assays that can be easily and rapidly performed.

[0254] In view of the above, a method of determining the presence, amount, or concentration of analyte (or a fragment thereof) in a test sample is provided. The method comprises assaying the test sample for an analyte (or a fragment thereof) by an assay (i) employing (i′) at least one of an antibody, a fragment of an antibody that can bind to an analyte, a variant of an antibody that can bind to an analyte, a fragment of a variant of an antibody that can bind to an analyte, a binding protein as disclosed herein, and a DVD-binding protein (or a fragment, a variant, or a fragment of a variant thereof) that can bind to an analyte, and (ii′) at least one detectable label and (ii) comprising comparing a signal generated by the detectable label as a direct or indirect indication of the presence, amount or concentration of analyte (or a fragment thereof) in the test sample to a signal generated as a direct or indirect indication of the presence, amount or concentration of analyte (or a fragment thereof) in a control or calibrator. The calibrator is optionally part of a series of calibrators, in which each of the calibrators differs from the other calibrators by the concentration of analyte.

[0255] The method can comprise (i) contacting the test sample with at least one first specific binding partner for analyte (or a fragment thereof) comprising an antibody, a fragment of an antibody that can bind to an analyte, a variant of an antibody that can bind to an analyte, a fragment of a variant of an antibody that can bind to an analyte, a binding protein as disclosed herein, or a DVD-binding protein (or a fragment, a variant, or a fragment of a variant thereof) that can bind to an analyte so as to form a first specific binding partner/analyte (or fragment thereof) complex, (ii) contacting the first specific binding partner/analyte (or fragment thereof) complex with at least one second specific binding partner for analyte (or fragment thereof) comprising a detectably labeled anti-analyte antibody, a detectably labeled fragment of an anti-analyte antibody that can bind to analyte, a detectably labeled variant of an anti-analyte antibody that can bind to analyte, a detectably labeled fragment of a variant of an anti-analyte antibody that can bind to analyte, a detectably labeled binding protein as disclosed herein that can bind to analyte, or a detectably labeled DVD-binding protein (or a fragment, a variant, or a fragment of a variant thereof) so as to form a first specific binding partner/analyte (or fragment thereof)/second specific binding partner complex, and (iii) determining the presence, amount or concentration of analyte in the test sample by detecting or measuring the signal generated by the detectable label in the first specific binding partner/analyte (or fragment thereof)/second specific binding partner complex formed in (ii). A method in which at least one first specific binding partner for analyte (or a fragment thereof) and/or at least one second specific binding partner for analyte (or a fragment thereof) is a binding protein as disclosed herein or a DVD-binding protein (or a fragment, a variant, or a fragment of a variant thereof) as described herein can be preferred.

[0256] Alternatively, the method can comprise contacting the test sample with at least one first specific binding partner for analyte (or a fragment thereof) comprising an antibody, a fragment of an antibody that can bind to an analyte, a variant of an antibody that can bind to an analyte, a fragment of a variant of an antibody that can bind to an analyte, a binding protein as disclosed herein, and a DVD-binding protein (or a fragment, a variant, or a fragment of a variant thereof) and simultaneously or sequentially, in either order, contacting the test sample with at least one second specific binding partner, which can compete with analyte (or a fragment thereof) for binding to the at least one first specific binding partner and which comprises a detectably labeled analyte, a detectably labeled fragment of analyte that can bind to the first specific binding partner, a detectably labeled variant of analyte that can bind to the first specific binding partner, or a detectably labeled fragment of a variant of analyte that can bind to the first specific binding partner. Any analyte (or a fragment thereof) present in the test sample and the at least one second specific binding partner compete with each other to form a first specific binding partner/analyte (or fragment thereof) complex and a first specific binding partner/second specific binding partner complex, respectively. The method further comprises determining the presence, amount or concentration of analyte in the test sample by detecting or measuring the signal generated by the detectable label in the first specific binding partner/second specific binding partner complex formed in (ii), wherein the signal generated by the detectable label in the first specific binding partner/second specific binding partner complex is inversely proportional to the amount or concentration of analyte in the test sample.

[0257] The above methods can further comprise diagnosing, prognosticating, or assessing the efficacy of a therapeutic/prophylactic treatment of a patient from whom the test sample was obtained. If the method further comprises assessing the efficacy of a therapeutic/prophylactic treatment of the patient from whom the test sample was obtained, the method optionally further comprises modifying the therapeutic/prophylactic treatment of the patient as needed to improve efficacy. The method can be adapted for use in an automated system or a semi-automated system.

[0258] With regard to the methods of assay (and kit therefor), it may be possible to employ commercially available anti-analyte antibodies or methods for production of anti-analyte as described in the literature. Commercial supplies of various antibodies include, but are not limited to, Santa Cruz Biotechnology Inc. (Santa Cruz, Calif.), GenWay Biotech, Inc. (San Diego, Calif.), and R&D Systems (RDS; Minneapolis, Minn.).

[0259] Generally, a predetermined level can be employed as a benchmark against which to assess results obtained upon assaying a test sample for analyte or a fragment thereof, e.g., for detecting disease or risk of disease. Generally, in making such a comparison, the predetermined level is obtained by running a particular assay a sufficient number of times and under appropriate conditions such that a linkage or association of analyte presence, amount or concentration with a particular stage or endpoint of a disease, disorder or condition or with particular clinical indicia can be made. Typically, the predetermined level is obtained with assays of reference subjects (or populations of subjects). The analyte measured can include fragments thereof, degradation products thereof, and/or enzymatic cleavage products thereof.

[0260] In particular, with respect to a predetermined level as employed for monitoring disease progression and/or treatment, the amount or concentration of analyte or a fragment thereof may be “unchanged,” “favorable” (or “favorably altered”), or “unfavorable” (or “unfavorably altered”). “Elevated” or “increased” refers to an amount or a concentration in a test sample that is higher than a typical or normal level or range (e.g., predetermined level), or is higher than another reference level or range (e.g., earlier or baseline sample). The term “lowered” or “reduced” refers to an amount or a concentration in a test sample that is lower than a typical or normal level or range (e.g., predetermined level), or is lower than another reference level or range (e.g., earlier or baseline sample). The term “altered” refers to an amount or a concentration in a sample that is altered (increased or decreased) over a typical or normal level or range (e.g., predetermined level), or over another reference level or range (e.g., earlier or baseline sample).

[0261] The typical or normal level or range for analyte is defined in accordance with standard practice. Because the levels of analyte in some instances will be very low, a so-called altered level or alteration can be considered to have occurred when there is any net change as compared to the typical or normal level or range, or reference level or range, that cannot be explained by experimental error or sample variation. Thus, the level measured in a particular sample will be compared with the level or range of levels determined in similar samples from a so-called normal subject. In this context, a “normal subject” is an individual with no detectable disease, for example, and a “normal” (sometimes termed “control”) patient or population is/are one(s) that exhibit(s) no detectable disease, respectively, for example. Furthermore, given that analyte is not routinely found at a high level in the majority of the human population, a “normal subject” can be considered an individual with no substantial detectable increased or elevated amount or concentration of analyte, and a “normal” (sometimes termed “control”) patient or population is/are one(s) that exhibit(s) no substantial detectable increased or elevated amount or concentration of analyte. An “apparently normal subject” is one in which analyte has not yet been or currently is being assessed. The level of an analyte is “elevated” when the analyte is normally undetectable (e.g., the normal level is zero, or within a range of from about 25 to about 75 percentiles of normal populations), but is detected in a test sample, as well as when the analyte is present in the test sample at a higher than normal level. Thus, inter alia, the disclosure provides a method of screening for a subject having, or at risk of having, a particular disease, disorder, or condition. The method of assay can also involve the assay of other markers and the like.

[0262] Accordingly, the methods described herein also can be used to determine whether or not a subject has or is at risk of developing a given disease, disorder or condition. Specifically, such a method can comprise the steps of:

[0263] (a) determining the concentration or amount in a test sample from a subject of analyte (or a fragment thereof) (e.g., using the methods described herein, or methods known in the art); and

[0264] (b) comparing the concentration or amount of analyte (or a fragment thereof) determined in step (a) with a predetermined level, wherein, if the concentration or amount of analyte determined in step (a) is favorable with respect to a predetermined level, then the subject is determined not to have or be at risk for a given disease, disorder or condition. However, if the concentration or amount of analyte determined in step (a) is unfavorable with respect to the predetermined level, then the subject is determined to have or be at risk for a given disease, disorder or condition.

[0265] Additionally, provided herein is method of monitoring the progression of disease in a subject. Optimally the method comprising the steps of:

[0266] (a) determining the concentration or amount in a test sample from a subject of analyte;

[0267] (b) determining the concentration or amount in a later test sample from the subject of analyte; and

[0268] (c) comparing the concentration or amount of analyte as determined in step (b) with the concentration or amount of analyte determined in step (a), wherein if the concentration or amount determined in step (b) is unchanged or is unfavorable when compared to the concentration or amount of analyte determined in step (a), then the disease in the subject is determined to have continued, progressed or worsened. By comparison, if the concentration or amount of analyte as determined in step (b) is favorable when compared to the concentration or amount of analyte as determined in step (a), then the disease in the subject is determined to have discontinued, regressed or improved.

[0269] Optionally, the method further comprises comparing the concentration or amount of analyte as determined in step (b), for example, with a predetermined level. Further, optionally the method comprises treating the subject with one or more pharmaceutical compositions for a period of time if the comparison shows that the concentration or amount of analyte as determined in step (b), for example, is unfavorably altered with respect to the predetermined level.

[0270] Still further, the methods can be used to monitor treatment in a subject receiving treatment with one or more pharmaceutical compositions. Specifically, such methods involve providing a first test sample from a subject before the subject has been administered one or more pharmaceutical compositions. Next, the concentration or amount in a first test sample from a subject of analyte is determined (e.g., using the methods described herein or as known in the art). After the concentration or amount of analyte is determined, optionally the concentration or amount of analyte is then compared with a predetermined level. If the concentration or amount of analyte as determined in the first test sample is lower than the predetermined level, then the subject is not treated with one or more pharmaceutical compositions. However, if the concentration or amount of analyte as determined in the first test sample is higher than the predetermined level, then the subject is treated with one or more pharmaceutical compositions for a period of time. The period of time that the subject is treated with the one or more pharmaceutical compositions can be determined by one skilled in the art (for example, the period of time can be from about seven (7) days to about two years, preferably from about fourteen (14) days to about one (1) year).

[0271] During the course of treatment with the one or more pharmaceutical compositions, second and subsequent test samples are then obtained from the subject. The number of test samples and the time in which the test samples are obtained from the subject are not critical. For example, a second test sample could be obtained seven (7) days after the subject is first administered the one or more pharmaceutical compositions, a third test sample could be obtained two (2) weeks after the subject is first administered the one or more pharmaceutical compositions, a fourth test sample could be obtained three (3) weeks after the subject is first administered the one or more pharmaceutical compositions, a fifth test sample could be obtained four (4) weeks after the subject is first administered the one or more pharmaceutical compositions, etc.

[0272] After each second or subsequent test sample is obtained from the subject, the concentration or amount of analyte is determined in the second or subsequent test sample is determined (e.g., using the methods described herein or as known in the art). The concentration or amount of analyte as determined in each of the second and subsequent test samples is then compared with the concentration or amount of analyte as determined in the first test sample (e.g., the test sample that was originally optionally compared to the predetermined level). If the concentration or amount of analyte as determined in step (c) is favorable when compared to the concentration or amount of analyte as determined in step (a), then the disease in the subject is determined to have discontinued, regressed or improved, and the subject may continue to be administered the one or pharmaceutical compositions of step (b). However, if the concentration or amount determined in step (c) is unchanged or is unfavorable when compared to the concentration or amount of analyte as determined in step (a), then the disease in the subject is determined to have continued, progressed or worsened, and the subject may be treated with a higher concentration of the one or more pharmaceutical compositions administered to the subject in step (b) or the subject may be treated with one or more pharmaceutical compositions that are different from the one or more pharmaceutical compositions administered to the subject in step (b). Specifically, the subject can be treated with one or more pharmaceutical compositions that are different from the one or more pharmaceutical compositions that the subject had previously received to decrease or lower the subject's analyte level.

[0273] Generally, for assays in which repeat testing may be done (e.g., monitoring disease progression and/or response to treatment), a second or subsequent test sample is obtained at a period in time after the first test sample has been obtained from the subject. Specifically, a second test sample from the subject can be obtained minutes, hours, days, weeks or years after the first test sample has been obtained from the subject. For example, the second test sample can be obtained from the subject at a time period of about 1 minute, about 5 minutes, about 10 minutes, about 15 minutes, about 30 minutes, about 45 minutes, about 60 minutes, about 2 hours, about 3 hours, about 4 hours, about 5 hours, about 6 hours, about 7 hours, about 8 hours, about 9 hours, about 10 hours, about 11 hours, about 12 hours, about 13 hours, about 14 hours, about 15 hours, about 16 hours, about 17 hours, about 18 hours, about 19 hours, about 20 hours, about 21 hours, about 22 hours, about 23 hours, about 24 hours, about 2 days, about 3 days, about 4 days, about 5 days, about 6 days, about 7 days, about 2 weeks, about 3 weeks, about 4 weeks, about 5 weeks, about 6 weeks, about 7 weeks, about 8 weeks, about 9 weeks, about 10 weeks, about 11 weeks, about 12 weeks, about 13 weeks, about 14 weeks, about 15 weeks, about 16 weeks, about 17 weeks, about 18 weeks, about 19 weeks, about 20 weeks, about 21 weeks, about 22 weeks, about 23 weeks, about 24 weeks, about 25 weeks, about 26 weeks, about 27 weeks, about 28 weeks, about 29 weeks, about 30 weeks, about 31 weeks, about 32 weeks, about 33 weeks, about 34 weeks, about 35 weeks, about 36 weeks, about 37 weeks, about 38 weeks, about 39 weeks, about 40 weeks, about 41 weeks, about 42 weeks, about 43 weeks, about 44 weeks, about 45 weeks, about 46 weeks, about 47 weeks, about 48 weeks, about 49 weeks, about 50 weeks, about 51 weeks, about 52 weeks, about 1.5 years, about 2 years, about 2.5 years, about 3.0 years, about 3.5 years, about 4.0 years, about 4.5 years, about 5.0 years, about 5.5. years, about 6.0 years, about 6.5 years, about 7.0 years, about 7.5 years, about 8.0 years, about 8.5 years, about 9.0 years, about 9.5 years or about 10.0 years after the first test sample from the subject is obtained.

[0274] When used to monitor disease progression, the above assay can be used to monitor the progression of disease in subjects suffering from acute conditions. Acute conditions, also known as critical care conditions, refer to acute, life-threatening diseases or other critical medical conditions involving, for example, the cardiovascular system or excretory system. Typically, critical care conditions refer to those conditions requiring acute medical intervention in a hospital-based setting (including, but not limited to, the emergency room, intensive care unit, trauma center, or other emergent care setting) or administration by a paramedic or other field-based medical personnel. For critical care conditions, repeat monitoring is generally done within a shorter time frame, namely, minutes, hours or days (e.g., about 1 minute, about 5 minutes, about 10 minutes, about 15 minutes, about 30 minutes, about 45 minutes, about 60 minutes, about 2 hours, about 3 hours, about 4 hours, about 5 hours, about 6 hours, about 7 hours, about 8 hours, about 9 hours, about 10 hours, about 11 hours, about 12 hours, about 13 hours, about 14 hours, about 15 hours, about 16 hours, about 17 hours, about 18 hours, about 19 hours, about 20 hours, about 21 hours, about 22 hours, about 23 hours, about 24 hours, about 2 days, about 3 days, about 4 days, about 5 days, about 6 days or about 7 days), and the initial assay likewise is generally done within a shorter timeframe, e.g., about minutes, hours or days of the onset of the disease or condition.

[0275] The assays also can be used to monitor the progression of disease in subjects suffering from chronic or non-acute conditions. Non-critical care or, non-acute conditions, refers to conditions other than acute, life-threatening disease or other critical medical conditions involving, for example, the cardiovascular system and/or excretory system. Typically, non-acute conditions include those of longer-term or chronic duration. For non-acute conditions, repeat monitoring generally is done with a longer timeframe, e.g., hours, days, weeks, months or years (e.g., about 1 hour, about 2 hours, about 3 hours, about 4 hours, about 5 hours, about 6 hours, about 7 hours, about 8 hours, about 9 hours, about 10 hours, about 11 hours, about 12 hours, about 13 hours, about 14 hours, about 15 hours, about 16 hours, about 17 hours, about 18 hours, about 19 hours, about 20 hours, about 21 hours, about 22 hours, about 23 hours, about 24 hours, about 2 days, about 3 days, about 4 days, about 5 days, about 6 days, about 7 days, about 2 weeks, about 3 weeks, about 4 weeks, about 5 weeks, about 6 weeks, about 7 weeks, about 8 weeks, about 9 weeks, about 10 weeks, about 11 weeks, about 12 weeks, about 13 weeks, about 14 weeks, about 15 weeks, about 16 weeks, about 17 weeks, about 18 weeks, about 19 weeks, about 20 weeks, about 21 weeks, about 22 weeks, about 23 weeks, about 24 weeks, about 25 weeks, about 26 weeks, about 27 weeks, about 28 weeks, about 29 weeks, about 30 weeks, about 31 weeks, about 32 weeks, about 33 weeks, about 34 weeks, about 35 weeks, about 36 weeks, about 37 weeks, about 38 weeks, about 39 weeks, about 40 weeks, about 41 weeks, about 42 weeks, about 43 weeks, about 44 weeks, about 45 weeks, about 46 weeks, about 47 weeks, about 48 weeks, about 49 weeks, about 50 weeks, about 51 weeks, about 52 weeks, about 1.5 years, about 2 years, about 2.5 years, about 3.0 years, about 3.5 years, about 4.0 years, about 4.5 years, about 5.0 years, about 5.5. years, about 6.0 years, about 6.5 years, about 7.0 years, about 7.5 years, about 8.0 years, about 8.5 years, about 9.0 years, about 9.5 years or about 10.0 years), and the initial assay likewise generally is done within a longer time frame, e.g., about hours, days, months or years of the onset of the disease or condition.

[0276] Furthermore, the above assays can be performed using a first test sample obtained from a subject where the first test sample is obtained from one source, such as urine, serum or plasma. Optionally, the above assays can then be repeated using a second test sample obtained from the subject where the second test sample is obtained from another source. For example, if the first test sample was obtained from urine, the second test sample can be obtained from serum or plasma. The results obtained from the assays using the first test sample and the second test sample can be compared. The comparison can be used to assess the status of a disease or condition in the subject.

[0277] Moreover, the present disclosure also relates to methods of determining whether a subject predisposed to or suffering from a given disease, disorder or condition will benefit from treatment. In particular, the disclosure relates to analyte companion diagnostic methods and products. Thus, the method of “monitoring the treatment of disease in a subject” as described herein further optimally also can encompass selecting or identifying candidates for therapy.

[0278] Thus, in particular embodiments, the disclosure also provides a method of determining whether a subject having, or at risk for, a given disease, disorder or condition is a candidate for therapy. Generally, the subject is one who has experienced some symptom of a given disease, disorder or condition or who has actually been diagnosed as having, or being at risk for, a given disease, disorder or condition, and/or who demonstrates an unfavorable concentration or amount of analyte or a fragment thereof, as described herein.

[0279] The method optionally comprises an assay as described herein, where analyte is assessed before and following treatment of a subject with one or more pharmaceutical compositions (e.g., particularly with a pharmaceutical related to a mechanism of action involving analyte), with immunosuppressive therapy, or by immunoabsorption therapy, or where analyte is assessed following such treatment and the concentration or the amount of analyte is compared against a predetermined level. An unfavorable concentration of amount of analyte observed following treatment confirms that the subject will not benefit from receiving further or continued treatment, whereas a favorable concentration or amount of analyte observed following treatment confirms that the subject will benefit from receiving further or continued treatment. This confirmation assists with management of clinical studies, and provision of improved patient care.

[0280] It goes without saying that, while certain embodiments herein are advantageous when employed to assess a given disease, disorder or condition as discussed herein, the assays and kits can be employed to assess analyte in other diseases, disorders and conditions. The method of assay can also involve the assay of other markers and the like.

[0281] The method of assay also can be used to identify a compound that ameliorates a given disease, disorder or condition. For example, a cell that expresses analyte can be contacted with a candidate compound. The level of expression of analyte in the cell contacted with the compound can be compared to that in a control cell using the method of assay described herein.

[0282] VI) Kit

[0283] A kit for assaying a test sample for the presence, amount or concentration of an analyte (or a fragment thereof) in a test sample is also provided. The kit comprises at least one component for assaying the test sample for the analyte (or a fragment thereof) and instructions for assaying the test sample for the analyte (or a fragment thereof). The at least one component for assaying the test sample for the analyte (or a fragment thereof) can include a composition comprising a binding protein as disclosed herein and/or an anti-analyte DVD-binding protein (or a fragment, a variant, or a fragment of a variant thereof), which is optionally immobilized on a solid phase.

[0284] The kit can comprise at least one component for assaying the test sample for an analyte by immunoassay, e.g., chemiluminescent microparticle immunoassay, and instructions for assaying the test sample for an analyte by immunoassay, e.g., chemiluminescent microparticle immunoassay. For example, the kit can comprise at least one specific binding partner for an analyte, such as an anti-analyte, monoclonal/polyclonal antibody (or a fragment thereof that can bind to the analyte, a variant thereof that can bind to the analyte, or a fragment of a variant that can bind to the analyte), a binding protein as disclosed herein, or an anti-analyte DVD-binding protein (or a fragment, a variant, or a fragment of a variant thereof), either of which can be detectably labeled. Alternatively or additionally, the kit can comprise detectably labeled analyte (or a fragment thereof that can bind to an anti-analyte, monoclonal/polyclonal antibody, a binding protein as disclosed herein, or an anti-analyte DVD-binding protein (or a fragment, a variant, or a fragment of a variant thereof)), which can compete with any analyte in a test sample for binding to an anti-analyte, monoclonal/polyclonal antibody (or a fragment thereof that can bind to the analyte, a variant thereof that can bind to the analyte, or a fragment of a variant that can bind to the analyte), a binding protein as disclosed herein, or an anti-analyte DVD-binding protein (or a fragment, a variant, or a fragment of a variant thereof), either of which can be immobilized on a solid support. The kit can comprise a calibrator or control, e.g., isolated or purified analyte. The kit can comprise at least one container (e.g., tube, microtiter plates or strips, which can be already coated with a first specific binding partner, for example) for conducting the assay, and/or a buffer, such as an assay buffer or a wash buffer, either one of which can be provided as a concentrated solution, a substrate solution for the detectable label (e.g., an enzymatic label), or a stop solution. Preferably, the kit comprises all components, i.e., reagents, standards, buffers, diluents, etc., which are used to perform the assay. The instructions can be in paper form or computer-readable form, such as a disk, CD, DVD, or the like.

[0285] More specifically, provided is a kit for assaying a test sample for an antigen (or a fragment thereof). The kit comprises at least one component for assaying the test sample for an antigen (or a fragment thereof) and instructions for assaying the test sample for an antigen (or a fragment thereof), wherein the at least one component includes at least one composition comprising a binding protein, such as a DVD-binding protein, disclosed herein.

[0286] Any antibodies, such as an anti-analyte antibody, any binding protein as disclosed herein, any anti-analyte DVD-binding proteins, or tracers can incorporate a detectable label as described herein, such as a fluorophore, a radioactive moiety, an enzyme, a biotin/avidin label, a chromophore, a chemiluminescent label, or the like, or the kit can include reagents for carrying out detectable labeling. The antibodies, calibrators and/or controls can be provided in separate containers or pre-dispensed into an appropriate assay format, for example, into microtiter plates.

[0287] Optionally, the kit includes quality control components (for example, sensitivity panels, calibrators, and positive controls). Preparation of quality control reagents is well-known in the art and is described on insert sheets for a variety of immunodiagnostic products. Sensitivity panel members optionally are used to establish assay performance characteristics, and further optionally are useful indicators of the integrity of the immunoassay kit reagents, and the standardization of assays.

[0288] The kit can also optionally include other reagents required to conduct a diagnostic assay or facilitate quality control evaluations, such as buffers, salts, enzymes, enzyme co-factors, enzyme substrates, detection reagents, and the like. Other components, such as buffers and solutions for the isolation and/or treatment of a test sample (e.g., pretreatment reagents), also can be included in the kit. The kit can additionally include one or more other controls. One or more of the components of the kit can be lyophilized, in which case the kit can further comprise reagents suitable for the reconstitution of the lyophilized components.

[0289] The various components of the kit optionally are provided in suitable containers as necessary, e.g., a microtiter plate. The kit can further include containers for holding or storing a sample (e.g., a container or cartridge for a urine sample). Where appropriate, the kit optionally also can contain reaction vessels, mixing vessels, and other components that facilitate the preparation of reagents or the test sample. The kit can also include one or more instruments for assisting with obtaining a test sample, such as a syringe, pipette, forceps, measured spoon, or the like.

[0290] If the detectable label is at least one acridinium compound, the kit can comprise at least one acridinium-9-carboxamide, at least one acridinium-9-carboxylate aryl ester, or any combination thereof. If the detectable label is at least one acridinium compound, the kit also can comprise a source of hydrogen peroxide, such as a buffer, a solution, and/or at least one basic solution. If desired, the kit can contain a solid phase, such as a magnetic particle, bead, test tube, microtiter plate, cuvette, membrane, scaffolding molecule, film, filter paper, disc or chip.

[0291] A. Adaptation of Kit and Method

[0292] The kit (or components thereof), as well as the method of determining the presence, amount or concentration of an analyte in a test sample by an assay, such as an immunoassay as described herein, can be adapted for use in a variety of automated and semi-automated systems (including those wherein the solid phase comprises a microparticle), as described, e.g., in U.S. Pat. Nos. 5,089,424 and 5,006,309, and as commercially marketed, e.g., by Abbott Laboratories (Abbott Park, Ill.) as ARCHITECT®.

[0293] Some of the differences between an automated or semi-automated system as compared to a non-automated system (e.g., ELISA) include the substrate to which the first specific binding partner (e.g., an anti-analyte, monoclonal/polyclonal antibody (or a fragment thereof, a variant thereof, or a fragment of a variant thereof), a binding protein as disclosed herein, or an anti-analyte DVD-binding protein (or a fragment thereof, a variant thereof, or a fragment of a variant thereof) is attached; either way, sandwich formation and analyte reactivity can be impacted), and the length and timing of the capture, detection and/or any optional wash steps. Whereas a non-automated format, such as an ELISA, may require a relatively longer incubation time with sample and capture reagent (e.g., about 2 hours), an automated or semi-automated format (e.g., ARCHITECT®, Abbott Laboratories) may have a relatively shorter incubation time (e.g., approximately 18 minutes for ARCHITECTO). Similarly, whereas a non-automated format, such as an ELISA, may incubate a detection antibody, such as the conjugate reagent, for a relatively longer incubation time (e.g., about 2 hours), an automated or semi-automated format (e.g., ARCHITECT® may have a relatively shorter incubation time (e.g., approximately 4 minutes for the ARCHITECT®).

[0294] Other platforms available from Abbott Laboratories include, but are not limited to, AxSYM®, IMx® (see, e.g., U.S. Pat. No. 5,294,404, PRISM®, EIA (bead), and Quantum™ II, as well as other platforms. Additionally, the assays, kits and kit components can be employed in other formats, for example, on electrochemical or other hand-held or point-of-care assay systems. The present disclosure is, for example, applicable to the commercial Abbott Point of Care (i-STAT®, Abbott Laboratories) electrochemical immunoassay system that performs sandwich immunoassays Immunosensors and their methods of manufacture and operation in single-use test devices are described, for example in, U.S. Pat. Nos. 5,063,081, 7,419,821; and 7,682,833; US Publication Nos. 20040018577 and 20060160164.

[0295] It further goes without saying that the methods and kits as described herein necessarily encompass other reagents and methods for carrying out the immunoassay. For instance, encompassed are various buffers such as are known in the art and/or which can be readily prepared or optimized to be employed, e.g., for washing, as a conjugate diluent, microparticle diluent, and/or as a calibrator diluent. An exemplary conjugate diluent is ARCHITECT® conjugate diluent employed in certain kits (Abbott Laboratories, Abbott Park, Ill.) and containing 2-(N-morpholino)ethanesulfonic acid (MES), a salt, a protein blocker, an antimicrobial agent, and a detergent. An exemplary calibrator diluent is ARCHITECT® human calibrator diluent employed in certain kits (Abbott Laboratories, Abbott Park, Ill.), which comprises a buffer containing MES, other salt, a protein blocker, and an antimicrobial agent. Additionally, as described in U.S. Patent Application No. 61/142,048 filed Dec. 31, 2008, improved signal generation may be obtained, e.g., in an I-Stat cartridge format, using a nucleic acid sequence linked to the signal antibody as a signal amplifier.

[0296] It will be readily apparent to those skilled in the art that other suitable modifications and adaptations of the methods described herein are obvious and may be made using suitable equivalents without departing from the scope of the embodiments disclosed herein. Having now described certain embodiments in detail, the same will be more clearly understood by reference to the following examples, which are included for purposes of illustration only and are not intended to be limiting.

### EXAMPLES

### Example 1

### Preparation of Improved TNF-α Parental Binding Proteins

### Example 1.1

### Identification of Fully Human Binding Proteins to TNF by In Vitro Display Systems

### 1.1.1: Antibody Selections

[0297] Fully human anti-human TNF monoclonal antibodies were isolated by in vitro display technologies from human antibody libraries by their ability to bind recombinant human TNF proteins. The amino acid sequences of the variable heavy (VH) and variable light (VL) chains were determined from DNA sequencing and listed in Table 1B in section A)I)A) above.

### 1.1.2: Affinity Maturation of the Fully Human Human TNF Binding Protein AE11-5

[0298] The AE11-5 human binding protein to human TNF was affinity matured by in vitro display technology. One light chain library was constructed to contain limited mutagenesis at the following residues: 28, 31, 32, 51, 55, 91, 92, 93, 95a and 96 (Kabat numbering). This library also contained framework germline back-mutations D1E, M4L, H11Q, R49K, H76N and Q103K as well as toggled residues at position 50 (R/K) and 94 (S/L) to allow for framework germlining during library selections. Two heavy chain libraries were made to contain limited mutagenesis in CDRH1 and CDRH2 at residues 30, 31, 33, 50, 52, and 55 to 58 (Kabat numbering) or in CDRH3 at residues 95 to 100b. The library containing CDRH1 and CDRH2 diversities also had framework germline back-mutations A18V and L64Q and toggled residue at 54 (L/F) and 78 (V/A). The CDRH3 library had an additional toggled residue at 100 c (A/F).

[0299] All three libraries were selected separately for the ability to bind human or cynomolgus monkey TNF in the presence of decreasing concentrations of biotinylated human or cynomolgus monkey TNF antigens. All mutated CDR sequences recovered from library selections were recombined into additional libraries and the recombined libraries were subjected to more stringent selection conditions before individual antibodies are identified.

[0300] The table below (Table 2) provides a list of amino acid sequences of VH and VL of the fully human AE11-5 binding protein which were subjected to the affinity maturation selection protocol. Amino acid residues of individual CDRs of each VH and VL sequence are indicated in bold.

TABLE 2
Amino acid residues observed in affinity matured AE11-5 antibodies
AE11-5 Heavy chain variable region (SEQ ID NO: 805)

| | |
|---|---|
| AE11-5VH | 1234567890123456789012345678901234567890123456789012a345678901 |
| | EVQLVQSGAEVKKPGSSAKVSCKASGGTFSSYAISWVRQAPGQGLEWMGGIIPILGTANYAQ |
| | V NW TTT WT FRSPI |
| | TY SV M TDAST |
| | GI P L I NGS |
| | AN G V P V |
| | F N I H |
| | R V A |
| | L K R |
| | F M |
| | L |
| | 234567890123456789012abc345678901234567890abc1234567890123 |
| | KFLGRVTITADESTSTVYMELSSLRSEDTAVYYCARGLYYDPTRADYWGQGTLVTVSS |
| | Q A SVFFNTSWF |
| | WIVVEFASM |
| | TFP TRKP |
| | ARH IGRA |
| | Q ADI |
| | Y |
| | V |
| | P |
| | N |
| | G |

AE11-5 Light chain variable region (SEQ ID NO: 806)

| | |
|---|---|
| AE11-5VL | 1234567890123456789012345678901234567890123456789012345678901 |
| | DIVMTQSPDFHSVTPKEKVTITCRASQSIGSSLHWYQQKPDQSPKLLIRHASQSISGVPSR |
| | E L Q R RR KYV L |
| | T TT P V |
| | N GN T T |
| | I NC G S |
| | C KG S M |
| | G CI E N |
| | K HK D K |
| | Y VM F |
| | W PL R |
| | LY |
| | P |
| | V |
| | 2345678901234567890123456789012345a67890123456a |
| | FSGSGSGTDFTLTIHSLEAEDAATYYCHQSSSSPPPTFGQGTQVEIK |
| | N RRRL LS K |
| | NGI AR |
| | GIC SL |
| | TCG RT |
| | CNN TA |
| | ITT QQ |
| | MK HH |
| | V |
| | M |

### Example 1.2

### Affinity Maturation of a Humanized Human TNF Binding Protein hMAK-195

[0301] The mouse anti-human TNF antibody MAK-195 was humanized and affinity-matured to generate a panel of humanized MAK195 variants that have cross-reactivity to cyno-TNF and improved affinity and binding kinetics against both human and cyno TNF.

[0302] To improve the affinity of hMAK195 to TNF, hypermutated CDR residues were identified from other human antibody sequences in the IgBLAST database that also shared high identity to germlines VH3-53 and IGKV1-39. The corresponding hMAK195 CDR residues were then subjected to limited mutagenesis by PCR with primers having low degeneracy at these positions to create three antibody libraries in the scFv format. The first library contained mutations at residues 31, 32, 33, 35, 50, 52, 53, 54, 56 and 58 in the VH CDR1 and 2 (Kabat numbering); the second library at residues 95 to 100, 100a, 101, and 102 in VH CDR3; and the third library at residues 28, 30, 31, 32, 50, 53, 92, 93, 94, and 95 in the three VL CDRs. To further increase the identity of hMAK195 to the human germline framework sequences, a binary degeneracy at VH positions 60 (D/A), 61 (S/D), 62 (T/S), 63 (L/V), and 65 (S/G) were introduced into the first library. Also, a binary degeneracy at VL positions 24 (K/R), 33 (V/L), 54 (R/L), 55 (H/Q), 56 (T/S), 91 (H/S) and 96 (F/Y) were introduced into the third library.

[0303] These hMAK195 selected against a low concentration of biotinylated TNF for improved on-rate, off-rate, or both were carried out and antibody protein sequences of affinity-modulated hMAK195 were recovered for converting back to IgG for further characterization. All three libraries were selected separately for the ability to bind human or cynomolgus monkey TNF in the presence of decreasing concentrations of biotinylated human or cynomolgus monkey TNF antigens. All mutated CDR sequences recovered from library selections were recombined into additional libraries and the recombined libraries were subjected to more stringent selection conditions before individual antibodies are identified.

[0304] The table below (Table 3) provides a list of amino acid sequences of VH and VL of the humanized MAK-195 which were subjected to the affinity maturation selection protocol Amino acid residues of individual CDRs of each VH and VL sequence are indicated in bold.

TABLE 3
Amino acid residues observed in affinity matured hMAK-195.
hMAK195 Heavy chain variable region (SEQ ID NO: 807)

| | |
|---|---|
| hMAK195VH | EVQLVESGGGLVQPGGSLRLSCAASGFTFSDYGVNWVRQAPGKGLEWVSMINGDGSTD |
| | NFS T I RAG T A |
| | HLN S V GSE F H |
| | YS H L SDA A V |
| | IR Q R AEV Y S |
| | Y K LVG W N |
| | S NY G |
| | YDSTLKSRFTISRDNSKNTLYLQMNSLRAEDTAVYYCAREWHHGPVAYWGQGTLVTVSS |
| | ADSV G HSQQRTLDS |
| | QLRPASGVF |
| | LCLLVQDGC |
| | YRYNWAETN |
| | DFPYEKW P |
| | NDARS R I |
| | TYVTP P H |
| | PPDDI A |
| | AICA I |
| | SG C |
| | R |

hMAK195 Light chain variable region (SEQ ID NO: 808)

| | |
|---|---|
| hMAK195VL | DIQMTQSPSSLSASVGDRVTITCKASQAVSSAVAWYQQKPGKAPKLLIYWASTRHTG |
| | R S RRPL S SLQS |
| | V TNT R I T |
| | G IGG L L A |
| | D NCV C K E |
| | T CTS Q A F |
| | P KIR G R |
| | VPSRFSGSGSGTDFTLTISSLQPEDFATYYCQQHYSTPFTFGQGTKLEIK |
| | SNRSTY |
| | FGPR |
| | DTML |
| | GIIQ |
| | HCAA |
| | S |

[0305] Tables 1D and E above in section I)A) provide a list of humanized MAK-195 antibodies that were converted into IgG proteins for characterization.

[0306] Heavy and light chain pairs were prepared as follows in Table 4:

TABLE 4
Heavy and light chain pairs of hMAK195 affinity matured clones

| Clone | | | |
|---|---|---|---|
| name | HC | LC | Protein name |
| A8 | hMAK195-A8 | hMAK195 VL.1 | hMAK195-AM11 |
| B5 | hMAK195-B5 | hMAK195 VL.1 | hMAK195-AM13 |
| rHC3 | hMAK195 rHC3 | hMAK195 VL.1 | hMAK195-AM14 |
| rHC18 | hMAK195 rHC18 | hMAK195 VL.1 | hMAK195-AM15 |
| rHC19 | hMAK195 rHC19 | hMAK195 VL.1 | hMAK195-AM16 |
| rHC22 | hMAK195 rHC22 | hMAK195 VL.1 | hMAK195-AM17 |
| rHC34 | hMAK195 rHC34 | hMAK195 VL.1 | hMAK195-AM18 |
| rHC60 | hMAK195 rHC60 | hMAK195 VL.1 | hMAK195-AM19 |
| S4-6 | hMAK195 S4-6 | hMAK195 S4-6 | hMAK195-AM20 |
| S4-12 | hMAK195 S4-12 | hMAK195 S4-12 | hMAK195-AM21 |
| S4-17 | hMAK195 S4-17 | hMAK195 S4-17 | hMAK195-AM22 |
| S4-18 | hMAK195 S4-18 | hMAK195 S4-18 | hMAK195-AM23 |
| S4-19 | hMAK195 S4-19 | hMAK195 S4-19 | hMAK195-AM24 |
| S4-24 | hMAK195 S4-24 | hMAK195 S4-24 | hMAK195-AM25 |
| S4-34 | hMAK195 S4-34 | hMAK195 S4-34 | hMAK195-AM26 |

### Example 1.3

### Affinity Maturation of a Humanized Human TNF Binding Protein hMAK-199

[0307] The mouse anti-human TNF antibody MAK-199 was humanized and affinity-matured to generate a panel of humanized MAK195 variants that have improved affinity and binding kinetics against both human and cyno TNF. Several libraries were made according to specifications below:

[0308] Three HC libraries were made after the V2I back-mutation was first introduced and confirmed that it did not impact scFv affinity to TNF.

H1+H2 (DDK) library:

[0309] Limited mutagenesis at 7 residues (T30, N31, N35, T52a, T54, E56, T58)

[0310] Germline toggle: M34I and F63L

H1+H2 (QKQ) library:

[0311] Limited mutagenesis at 7 residues (T30, N31, N35, T52a, T54, E56, T58)

[0312] Germline toggle: M34I and F63L

[0313] Germline back-mutations: D61Q, D62K, K64Q, F67V, F69M, L71T

H3 library:

[0314] Limited mutagenesis at 12 residues 95-100, 100a-100f

[0315] Germline toggle: F91Y

LC library:

[0316] Limited mutagenesis at 11 residues 28, 30-32, 50, 53, 91-94, 96

[0317] Germline toggles: T51A, Y71F, F87Y, and T43A/V44P (these two co-evolve)

Recombined libraries:

[0318] VH libraries will be recombined with and without VL library after library diversity is reduced after at least 3 rounds of selection.

[0319] All four libraries were selected separately for the ability to bind human or cynomolgus monkey TNF in the presence of decreasing concentrations of biotinylated human or cynomolgus monkey TNF antigens. All mutated CDR sequences recovered from library selections were recombined into additional libraries and the recombined libraries were subjected to more stringent selection conditions before individual antibodies are identified.

[0320] The table below (Table 5) provides a list of amino acid sequences of VH and VL of the hMAK-199 antibody which were subjected to the affinity maturation selection protocol Amino acid residues of individual CDRs of each VH and VL sequence are indicated in bold.

TABLE 5
Amino acid residues observed in affinity matured hMAK-199
binding proteins
MAK199 Heavy chain variable region (SEQ ID NO: 809)

| | |
|---|---|
| MAK199 | 1234567890123456789012345678901234567890123456789012a345678901 |
| VH.2a | EIQLVQSGAEVKKPGASVKVSCKASGYTFTNYGMNWVRQAPGQGLEWMGWINTYTGEPTYAD |
| | V ND II N K S Q |
| | AH T S V H |
| | ST Q Q N |
| | RS S R M |
| | DQ G L K |
| | KK A S A |
| | P V N R |
| | Q I Q |
| | M D D |
| | G A |
| | E |
| | 234567890123456789012abc345678901234567890abcdefg1234567890123 |
| | DFKGRFTFTLDTSTSTAYMELSSLRSEDTAVYFCARKFLTTVVVTDYAMDYWGQGTTVTVSS |
| | GLT V M T Y RLFNPMDASENT |
| | K Q NYMKVEAEM SR |
| | IRSSAEMN CC |
| | VSRARSD H |
| | CWL IMG D |
| | QP QII I |
| | VF GPQ F |
| | ND D P V |
| | GM N L |
| | CA L A |
| | H |

Mak199 Light chain variable region (SEQ ID NO: 810)

| | |
|---|---|
| Mak199 | 1234567890123456789012345678901234567890123456789012345678901 |
| Vk.1a | DIQMTQSPSSLSASVGDRVTITCRASQDISNYLNWYQQKPGKTVKLLIYYTSRLQSGVPSR |
| | N YQV AP FA L |
| | E ESF V N K |
| | H AKT G |
| | G TT |
| | V WH |
| | R GD |
| | A NR |
| | F |
| | C |
| | 234567890123456789012345678901234567890123456a |
| | FSGSGSGTDYTLTISSLQPEDFATYFCQQGNTLPPTFGQGTKLEIK |
| | F Y ISW T |
| | MQ S |
| | IP A |
| | AM |
| | RR |
| | F |
| | G |
| | V |
| | Y |
| | A |

[0321] Individual hMAK-199 VH and VL sequences from converted clones were prepared and are shown above in Tables 1F and G in section I)A).

TABLE 6
hMAK199 affinity matured scFv clones
converted to full length IgG

| | | | Full length |
|---|---|---|---|
| ScFv | | | IgG (protein) |
| Clone name | HC plasmid | LC plasmid | name |
| J662M2S3#10 | pHybE-hCg1, z, non- | pHybE-hCk V3 | hMAK199- |
| | a V2 J662M2S3#10 | J662 M2S3#10 | AM1 |
| J662M2S3#13 | pHybE-hCg1, z, non- | pHybE-hCk V3 | hMAK199- |
| | a V2 J662M2S3#13 | J662 M2S3#13 | AM2 |
| J662M2S3#15 | pHybE-hCg1, z, non- | pHybE-hCk V3 | hMAK199- |
| | a V2 J662M2S3#15 | J662 M2S3#15 | AM3 |
| J662M2S3#16 | pHybE-hCg1, z, non- | pHybE-hCk V3 | hMAK199- |
| | a V2 J662M2S3#16 | J662 M2S3#16 | AM4 |
| J662M2S3#21 | pHybE-hCg1, z, non- | pHybE-hCk V3 | hMAK199- |
| | a V2 J662M2S3#21 | J662 M2S3#21 | AM5 |
| J662M2S3#34 | pHybE-hCg1, z, non- | pHybE-hCk V3 | hMAK199- |
| | a V2 J662M2S3#34 | J662 M2S3#34 | AM6 |
| J662M2S3#36 | pHybE-hCg1, z, non- | pHybE-hCk V3 | hMAK199- |
| | a V2 J662M2S3#36 | J662 M2S3#36 | AM7 |
| J662M2S3#45 | pHybE-hCg1, z, non- | pHybE-hCk V3 | hMAK199- |
| | a V2 J662M2S3#45 | J662 M2S3#45 | AM8 |
| J662M2S3#58 | pHybE-hCg1, z, non- | pHybE-hCk V3 | hMAK199- |
| | a V2 J662M2S3#58 | J662 M2S3#58 | AM9 |
| J662M2S3#72 | pHybE-hCg1, z, non- | pHybE-hCk V3 | hMAK199- |
| | a V2 J662M2S3#72 | J662 M2S3#72 | AM10 |

### Example 1.4

### Affinity Determination Using BIACORE Technology

TABLE 7
Reagent for Biacore Analyses

| Antigen | Vendor Designation | Vendor | Catalog # |
|---|---|---|---|
| TNFα | Recombinant Human TNF- | R&D systems | 210-TA |
| | α/TNFSF1A | | |

### BIACORE Methods:

[0323] The BIACORE assay (Biacore, Inc. Piscataway, N.J.) determines the affinity of binding proteins with kinetic measurements of on-rate and off-rate constants. Binding of binding proteins to a target antigen (for example, a purified recombinant target antigen) is determined by surface plasmon resonance-based measurements with a Biacore® 1000 or 3000 instrument (Biacore® AB, Uppsala, Sweden) using running HBS-EP (10 mM HEPES [pH 7.4], 150 mM NaCl, 3 mM EDTA, and 0.005% surfactant P20) at 25° C. All chemicals are obtained from Biacore® AB (Uppsala, Sweden) or otherwise from a different source as described in the text. For example, approximately 5000 RU of goat anti-mouse IgG, (Fcγ), fragment specific polyclonal antibody (Pierce Biotechnology Inc, Rockford, Ill., US) diluted in 10 mM sodium acetate (pH 4.5) is directly immobilized across a CM5 research grade biosensor chip using a standard amine coupling kit according to manufacturer's instructions and procedures at 25 μg/ml. Unreacted moieties on the biosensor surface are blocked with ethanolamine. Modified carboxymethyl dextran surface in flowcell 2 and 4 is used as a reaction surface. Unmodified carboxymethyl dextran without goat anti-mouse IgG in flow cell 1 and 3 is used as the reference surface. For kinetic analysis, rate equations derived from the 1:1 Langmuir binding model are fitted simultaneously to association and dissociation phases of all eight injections (using global fit analysis) with the use of Biaevaluation 4.0.1 software. Purified antibodies are diluted in HEPES-buffered saline for capture across goat anti-mouse IgG specific reaction surfaces. Antibodies to be captured as a ligand (25 μg/ml) are injected over reaction matrices at a flow rate of 5 μl/minute. The association and dissociation rate constants, kₒₙ (M⁻¹s⁻¹) and k_{off} (s⁻¹), are determined under a continuous flow rate of 25 μl/minute. Rate constants are derived by making kinetic binding measurements at different antigen concentrations ranging from 10-200 nM. The equilibrium dissociation constant (M) of the reaction between antibodies and the target antigen is then calculated from the kinetic rate constants by the following formula: K_{D}=k_{off}/kₒₙ. Binding is recorded as a function of time and kinetic rate constants are calculated. In this assay, on-rates as fast as 10⁶M⁻¹s⁻¹ and off-rates as slow as 10⁻⁶ s⁻¹ can be measured.

[0324] The binding proteins herein are expected to have beneficial properties in this regard, including high affinity, slow off rate, and high neutralizing capacity.

### Example 1.5

### Neutralization of Human TNF-α

[0325] L929 cells are grown to a semi-confluent density and harvested using 0.25% trypsin (Gibco #25300). The cells are washed with PBS, counted and resuspended at 1E6 cells/mL in assay media containing 4 μg/mL actinomycin D. The cells are seeded in a 96-well plate (Costar #3599) at a volume of 100 μL and 5E4 cells/well. The binding proteins and control IgG are diluted to a 4× concentration in assay media and serial 1:4 dilutions are performed. The huTNF-α is diluted to 400 pg/mL in assay media. Binding protein sample (200 μL) is added to the huTNF-α (200 μL) in a 1:2 dilution scheme and allowed to incubate for 0.5 hour at room temperature.

[0326] The binding protein/human TNF-α solution is added to the plated cells at 100 μL for a final concentration of 100 pg/mL huTNF-α and 150 nM-0.0001 nM binding protein. The plates are incubated for 20 hours at 37° C., 5% CO₂. To quantitate viability, 100 μL is removed from the wells and 10 μL of WST-1 reagent (Roche cat #11644807001) is added. Plates are incubated under assay conditions for 3.5 hours. The plates are read at OD 420-600 nm on a Spectromax 190 ELISA plate reader.

[0327] The binding proteins herein are expected to have beneficial properties in this regard, including high affinity, slow off rate, and high neutralizing capacity.

### Example 2

### Affinity Maturation of the Humanized Anti-Human IL-17 Antibody h10F7

[0328] The humanized anti-human IL-17 antibody was previously disclosed. This antibody was subsequently affinity matured to improve its overall affinity to human, cynomolgus monkey, and mouse IL-17. Several libraries were made according to specifications below:

H1+H2 library:

[0329] Limited mutagenesis at 7 residues at 30, 31, 33, 35, 53, 56, 57, and 58.

[0330] Toggle between human germline and h10F7 sequences at positions 27, 48, 51, 52, 54, 67, and 69.

H3 library:

[0331] Limited mutagenesis at 95-100 c and 102.

[0332] Toggle between human germline and h10F7 sequences at 93.

LC library 1:

[0333] Limited mutagenesis at 30, 31, 32, 34, 50, 53, 89, 91, 92, 93, and 96.

[0334] Toggle between human germline and h10F7 sequence at positions 4, 24, 27, 29, 33, 36, 43, 47, 52, and 55.

LC library 2: constructed with an additional residue at position G28 in CDR1 to increase identity to human antibodies.

[0335] Limited mutagenesis at 28, 30, 31, 32, 34, 50, 53, 89, 91, 92, 93, and 96.

[0336] Toggle between human germline and h10F7 sequence at positions 24, 27, 29, 33, 37, 44, 48, 52, and 55.

[0337] One framework germ-lining mutation in FR1 (position 4) to be tested first as scFv. “M” will be used over “L” if binding is not affected.

rHC library: recombine outputs of H1+H2 and H3 libraries.
rHCLC library: recombine outputs of H1+H2, H3, and LC1 or LC2 libraries. (LC2 used over LC1 if LC2 output binding appears to be at least as good as WT, otherwise recombine LC1 output).

[0338] All four libraries were selected separately for the ability to bind human, cynomolgus monkey and mouse IL-17 in the presence of decreasing concentrations of biotinylated antigens. All mutated CDR sequences recovered from library selections were recombined into additional libraries and the recombined libraries were subjected to more stringent selection conditions before individual antibodies are identified.

[0339] Table 8 provides a list of VH amino acid sequences of h10F7 antibody that were subjected to the affinity maturation selection protocol Amino acid residues of individual CDRs of each VH sequence are indicated in bold.

TABLE 8
List of amino acid sequences of affinity matured
h10F7 VII variants

| Clone | SEQ ID NO: | VH |
|---|---|---|
| J417M2S2-12VH | 121 | EVQLVQSGAEVKKPGSSVKVSCKASGYTFTDYEIH |
| | | WVRQAPGQGLEWIGVNDPDSGGTFYNQKFDGRVTI |
| | | TADKSTSTAYMELSSLRSEDTAVYYCTRYYRYESF |
| | | YGMDYWGQGTTVTVSS |
| J417M2S2-15VH | 122 | EVQLVQSGAEVKKPGSSVKVSCKASGYTFDDYEIH |
| | | WVRQAPGQGLEWMGVIDPESGGTLYNQKFDGRVTL |
| | | TADKSTSTAYMELSSLRSEDTAVYYCTRYYRYESF |
| | | YGMDYWGQGTTVTVSS |
| J417M2S2-16VH | 123 | EVQLVQSGAEVKKPGSSVKVSCKASGYTFTDYEIH |
| | | WVRQAPGQGLEWIGVNDPDSGGTLYNQKFDGRVTL |
| | | TADKSTSTAYMELSSLRSEDTAVYYCTRYYRYESF |
| | | YGMDYWGQGTTVTVSS |
| J417M2S2-18VH | 124 | EVQLVQSGAEVKKPGSSVKVSCKASGYTFTDYEIH |
| | | WVRQAPGQGLEWMGVNDPDSGGTLYNQKFDGRVTI |
| | | TADESTSTAYMELSSLRSEDTAVYYCTRYYRYESF |
| | | YGMDYWGQGTTVTVSS |
| J417M2S2-20VH | 125 | EVQLVQSGAEVKKPGSSVKVSCKASGYTFDDYEIH |
| | | WVRQAPGQGLEWIGVNDPESGGTMYNQKFDGRVTI |
| | | TADKSTSTAYMELSSLRSEDTAVYYCTRYYRYESF |
| | | YGMDYWGQGTTVTVSS |
| J417M2S2-23VH | 126 | EVQLVQSGAEVKKPGSSVKVSCKASGYTFDDYEIH |
| | | WVRQAPGQGLEWIGVNDPESGGTFYNQKFDGRATL |
| | | TADKSTSTAYMELSSLRSEDTAVYYCTRYYRYESF |
| | | YGMDYWGQGTTVTVSS |
| J417M2S2-25VH | 127 | EVQLVQSGAEVKKPGSSVKVSCKASGYTFTDYEIH |
| | | WVRQAPGQGLEWIGVNDPESGGTLYNQKFDGRVTL |
| | | TADKSTSTAYMELSSLRSEDTAVYYCTRYYRYESF |
| | | YGMDYWGQGTTVTVSS |
| J417M2S2-26VH | 128 | EVQLVQSGAEVKKPGSSVKVSCKASGYTFTDYEIH |
| | | WVRQAPGQGLEWIGVNDPESGGTFYNQKFDGRATL |
| | | TADESTSTAYMELSSLRSEDTAVYYCTRYYRYESF |
| | | YGMDYWGQGTTVTVSS |
| J417M2S2-34VH | 129 | EVQLVQSGAEVKKPGSSVKVSCKASGYTFTDYEIH |
| | | WVRQAPGQGLEWIGVNDPESGGTFYNQKFDGRATL |
| | | TADKSTSTAYMELSSLRSEDTAVYYCTRYYRYESF |
| | | YGMDYWGQGTTVTVSS |
| J417M2S2-37VH | 130 | EVQLVQSGAEVRKPGSSVKVSCKASGYTFEDYEIH |
| | | WVRQAPGQGLEWMGVIDPESGGTLYNQKFDGRVTL |
| | | TADKSTSTAYMELSSLRSEDTAVYYCTRYYRYESF |
| | | YGMDYWGQGTTVTVSS |
| J417M2S2-47VH | 131 | EVQLVQSGAEVKKPGSSVKVSCKASGYTFDDYEIH |
| | | WVRQAPGQGLEWIGVNDPESGGTLYNQKFDGRVTL |
| | | TADESTSTAYMELSSLRSEDTAVYYCTRYYRYESF |
| | | YGMDYWGQGTTVTVSS |
| J417M2S2-4VH | 132 | EVQLVQSGAEVKKPGSSVKVSCKASGYTFDDYEIH |
| | | WVRQAPGQGLEWMGVIDPESGGTLYNQKFDGRVTL |
| | | TADKSTSTAYMELSSLRSEDTAVYYCTRYYRYESF |
| | | YGMDYWGQGTTVTVSS |
| J417M2S2-50VH | 133 | EVQLVQSGAEVKKPGSSVKVSCKASGYTFDDYEIH |
| | | WVRQAPGQGLEWMGVIDPESGGTLYNQKFDGRATL |
| | | TADKSTSTAYMELSSLRSEDTAVYYCTRYYRYESF |
| | | YGMDYWGQGTTVTVSS |
| J417M2S2-51VH | 134 | EVQLVQSGAEVKKPGSSVKVSCKASGYTFEDYEIH |
| | | WVRQAPGQGLEWMGVIDPESGGTLYNQKFDGRVTL |
| | | TADKSTSTAYMELSSLRSEDTAVYYCTRYYRYESF |
| | | YGMDYWGQGTTVTVSS |
| J417M2S2-55VH | 135 | EVQLVQSGAEVKKPGSSVKVSCKASGYTFDDYEIH |
| | | WVRQAPGQGLEWMGVNDPESGGTLYNQKFDGRVTI |
| | | TADKSTSTAYMELSSLRSEDTAVYYCTRYYRYESF |
| | | YGMDYWGQGTTVTVSS |
| J417M2S2-56VH | 136 | EVQLVQSGAEVKKPGSSVKVSCKASGYTFTDYEIH |
| | | WVRQAPGQGLEWMGVNDPESGGTLYNQKFDGRVTL |
| | | TADKSTSTAYMELSSLRSEDTAVYYCTRYYRYESF |
| | | HGMDYWGQGTTVTVSS |
| J417M2S2-57VH | 137 | EVQLVQSGAEVKKPGSSVKVSCKASGYTFADYEIH |
| | | WVRQAPGQGLEWIGVNDPESGGTFYNQKFDGRATL |
| | | TADKSTSTAYMELSSLRSEDTAVYYCTRYYRYESF |
| | | YGMDYWGQGTTVTVSS |
| J417M2S2-64VH | 138 | EVQLVQSGAEVKKPGSSVKVSCKASGYTFDDYEIH |
| | | WVRQAPGQGLEWMGVNDPDSGGTLYNQKFDGRVTI |
| | | TADKSTSTAYMELSSLRSEDTAVYYCTRYYRYESF |
| | | YGMDYWGQGTTVTVSS |
| J417M2S2-65VH | 139 | EVQLVQSGAEVKKPGSSVKVSCKASGYTFSDYEIH |
| | | WVRQAPGQGLEWIGVNDPESGGTLYNQKFDGRVTI |
| | | TADKSTSTAYMELSSLRSEDTAVYYCTRYYRYESF |
| | | YGMDYWGQGTTVTVSS |
| J417M2S2-69VH | 140 | EVQLVQSGAEVKKPGSSVKVSCKASGYTFEDYEIH |
| | | WVRQAPGQGLEWMGVIDPESGGTLYNQKFDGRATI |
| | | TADKSTSTAYMELSSLRSEDTAVYYCTRYYRYESF |
| | | YGMDYWGQGTTVTVSS |
| J417M2S2-72VH | 141 | EVQLVQSGAEVKKPGSSVKVSCKASGYTFTDYEIH |
| | | WVRQAPGQGLEWIGVNDPESGGTLYNQKFDGRVTI |
| | | TADKSTSTAYMELSSLRSEDTAVYYCTKYYRYESF |
| | | YGMDYWGQGTTVTVSS |
| J417M2S2-73VH | 142 | EVQLVQSGAEVKKPGSSVKVSCKASGYTFTDYEIH |
| | | WVRQAPGQGLEWIGVIDPESGGTLYNQKFDGRATI |
| | | TADESTSTAYMELSSLRSEDTAVYYCTRYYRYESF |
| | | YGMDYWGQGTTVTVSS |
| J417M2S2-75VH | 143 | EVQLVQSGAEVKKPGSSVKVSCKASGYTFDDYEIH |
| | | WVRQAPGQGLEWIGVNDPESGGTLYNQKFDGRATI |
| | | TADKSTSTAYMELSSLRSEDTAVYYCTRYYRYESF |
| | | YGMDYWGQGTTVTVSS |
| J417M2S2-76VH | 144 | EVQLVQSGAEVKKPGSSVKVSCKASGYTFTEYEIH |
| | | WVRQAPGQGLEWMGVNDPESGGSFYNQKFDGRVTL |
| | | TADKSTSTAYMELSSLRSEDTAVYYCTRYYRYESF |
| | | YGMDYWGQGTTVTVSS |
| J417M2S2-7VH | 145 | EVQLVQSGAEVKKPGSSVKVSCKASGYTFTDYEIH |
| | | WVRQAPGQGLEWIGVNDPESGGTFYNQKFDGRVTL |
| | | TADKSTSTAYMELSSLRSEDTAVYYCTRYYRYESF |
| | | YGMDYWGQGTTVTVSS |
| J417M2S2-84VH | 146 | EVQLVQSGAEVKKPGSSVKVSCKASGYTFDDYEIH |
| | | WVRQAPGQGLEWIGVIDPESGGSLYNQKFDGRVTI |
| | | TADKSTSTAYMELSSLRSEDTAVYYCTRYYRYESF |
| | | YGMDYWGQGTTVTVSS |
| J417M2S2-85VH | 147 | EVQLVQSGAEVKKPGSSVKVSCKASGYTFDDYEIH |
| | | WVRQAPGQGLEWMGVIDPESGGTLYNQKFDGRATI |
| | | TADKSTSTAYMELSSLRSEDTAVYYCTRYYRYESF |
| | | YGMDYWGQGTTVTVSS |
| J417M2S2-86VH | 148 | EVQLVQSGAEVKKPGSSVKVSCKASGYTFDDYEIH |
| | | WVRQAPGQGLEWIGVNDPESGGTLYNQKFDGRATL |
| | | TADKSTSTAYMELSSLRSEDTAVYYCTRYYRYESF |
| | | YGMDYWGQGTTVTVSS |
| J417M2S2-89VH | 149 | EVQLVQSGAEVKKPGSSVKVSCKASGYTFDDYEIH |
| | | WVRQAPGQGLEWMGVIDPESGGSLYNQKFDGRVTL |
| | | TADKSTSTAYMELSSLRSEDTAVYYCTRYYRYESF |
| | | YGMDYWGQGTTVTVSS |
| J417M2S2-91VH | 150 | EVQLVQSGAEVKKPGSSVKVSCKASGYTFDDYEIH |
| | | WVRQAPGQGLEWIGVNDPDSGGTLYNQKFDGRVTI |
| | | TADKSTSTAYMELSSLRSEDTAVYYCTRYYRYESF |
| | | YGMDYWGQGTTVTVSS |
| J417M2S2-95VH | 151 | EVQLVQSGAEVKKPGSSVKVSCKASGYTFTDYEIH |
| | | WVRQAPGQGLEWIGVNDPESGGILYNQKFDGRATL |
| | | TADKSTSTAYMELSSLRSEDTAVYYCTRYYRYESF |
| | | YGMDYWGQGTTVTVSS |
| J417M2S2-96VH | 152 | EVQLVQSGAEVKKPGSSVKVSCKASGYTFSDYEIH |
| | | WVRQAPGQGLEWMGVNDPESGGTFYNQKFDGRVTL |
| | | TADESTSTAYMELSSLRSEDTAVYYCTRYYRYESF |
| | | YGMDYWGQGTTVTVSS |
| J417M2S3-14VH | 153 | EVQLVQSGAEVKKPGSSVKVSCKASGYTFDDYEIH |
| | | WVRQAPGQGLEWIGVNDPESGGTLYNQKFDGRVTI |
| | | TADKSTSTAYMELSSLRSEDTAVYYCTRYYRYESF |
| | | YGMDYWGQGTTVTVSS |
| J417M2S3-35VH | 154 | EVQLVQSGAEVKKPGSSVKVSCKASGYTFDEYEIH |
| | | WVRQAPGQGLEWMGVIDPESGGTLYNQKFDGRVTL |
| | | TADKSTSTAYMELSSLRSEDTAVYYCTRYYRYESF |
| | | YGMDYWGQGTTVTVSS |
| J417M2S3-54VH | 155 | EVQLVQSGAEVKKPGSSVKVSCKASGYTFTDYEIH |
| | | WVRQAPGQGLEWMGVNDPESGGTLYNQKFDGRVTL |
| | | TADKSTSTAYMELSSLRSEDTAVYYCTRYYRYESF |
| | | YGMDYWGQGTTVTVSS |
| J417M2S3-63VH | 156 | EVQLVQSGAEVKKPGSSVKVSCKASGYTFTDYEIH |
| | | WVRQAPGQGLEWIGVIDPESGGTLYNQKFDGRVTL |
| | | TADKSTSTAYMELSSLRSEDTAVYYCTRYYRYESF |
| | | YGMDYWGQGTTVTVSS |
| J417M2S3-81VH | 157 | EVQLVQSGAEVKKPGSSVKVSCKASGYTFTDYEIH |
| | | WVRQAPGQGLEWIGVNDPESGGTLYNQKFDGRATI |
| | | TADKSTSTAYMELSSLRSEDTAVYYCTRYYRYESF |
| | | YGMDYWGQGTTVTVSS |
| J417M2S3-83VH | 158 | EVQLVQSGAEVKKPGSSVKVSCKASGYTFTDYEIH |
| | | WVRQAPGQGLEWMGVIDPESGGSFYNQKFDGRATL |
| | | TADKSTSTAYMELSSLRSEDTAVYYCTRYYRYESF |
| | | YGMDYWGQGTTVTVSS |
| J417M2S3-86VH | 159 | EVQLVQSGAEVKKPGSSVKVSCKASGYTFTDYEIH |
| | | WVRQAPGQGLEWMGVNDPESGGTLYNQKFDGRATI |
| | | TADKSTSTAYMELSSLRSEDTAVYYCTRYYRYESF |
| | | YGMDYWGQGTTVTVSS |
| J417M2S3-89VH | 160 | EVQLVQSGAEVKKPGSSVKVSCKASGYTFDDYEIH |
| | | WVRQAPGQGLEWIGVNDPESGGTLYNQKFDGRVTL |
| | | TTDKSTSTAYMELSSLRSEDTAVYYCTRYYRYESF |
| | | YGMDYWGQGTTVTVSS |
| J420M2S2-1VH | 161 | EVQLVQSGAEVKKPGSSVKVSCKASGYTFTDYEIH |
| | | WVRQAPGQGLEWIGVNDPESGGTFYNQKFDGRATL |
| | | TADKSTSTAYMELSSLRSEDTAVYYCTRYDKWYSF |
| | | YGMDYWGQGTTVTVSS |
| J420M2S2-20VH | 162 | EVQLVQSGAEVKKPGSSVKVSCKASGYTFTDYEIH |
| | | WVRQAPGQGLEWIGVNDPESGGTFYNQKFDGRATL |
| | | TADKSTSTAYMELSSLRSEDTAVYYCTRYSKYWSF |
| | | SGMDYWGQGTTVTVSS |
| J420M2S2-21VH | 163 | EVQLVQSGAEVKKPGSSVKVSCKASGYTFTDYEIH |
| | | WVRQAPGQGLEWIGVNDPESGGTFYNQKFDGRATL |
| | | TADKSTSTAYMELSSLRSEDTAVYYCTRYDKYFGF |
| | | SGMDFWGQGTTVTVSS |
| J420M2S2-22VH | 164 | EVQLVQSGAEVKKPGSSVKVSCKASGYTFTDYEIH |
| | | WVRQAPGQGLEWIGVNDPESGGTFYNQKFDGRATL |
| | | TADKSTSTAYMELSSLRSEDTAVYYCTRYDKFDSF |
| | | QGMDYWGQGTTVTVSS |
| J420M2S2-28VH | 165 | EVQLVQSGAEVKKPGSSVKVSCKASGYTFTDYEIH |
| | | WVRQAPGQGLEWIGVNDPESGGTFYNQKFDGRATL |
| | | TADKSTSTAYMELSSLRSEDTAVYYCTRYDKYEGF |
| | | LGMDYWGQGTTVTVSS |
| J420M2S2-30VH | 166 | EVQLVQSGAEVKKPGSSVKVSCKASGYTFTDYEIH |
| | | WVRQAPGQGLEWIGVNDPESGGTFYNQKFDGRATL |
| | | TADKSTSTAYMELSSLRSEDTAVYYCTRYDKYWSF |
| | | YGMDYWGQGTTVTVSS |
| J420M2S2-34VH | 167 | EVQLVQSGAEVKKPGSSVKVSCKASGYTFTDYEIH |
| | | WVRQAPGQGLEWIGVNDPESGGTFYNQKFDGRATL |
| | | TADKSTSTAYMELSSLRSEDTAVYYCTRYDKFESF |
| | | NGMDYWGQGTTVTVSS |
| J420M2S2-39VH | 168 | EVQLVQSGAEVKKPGSSVKVSCKASGYTFTDYEIH |
| | | WVRQAPGQGLEWIGVNDPESGGTFYNQKFDGRATL |
| | | TADKSTSTAYMELSSLRSEDTAVYYCTRYDKYESF |
| | | SGMDYWGQGTTVTVSS |
| J420M2S2-40VH | 169 | EVQLVQSGAEVKKPGSSVKVSCKASGYTFTDYEIH |
| | | WVRQAPGQGLEWIGVNDPESGGTFYNQKFDGRATL |
| | | TADKSTSTAYMELSSLRSEDTAVYYCTRYDKWEGF |
| | | YGMDYWGQGTTVTVSS |
| J420M2S2-41VH | 170 | EVQLVQSGAEVKKPGSSVKVSCKASGYTFTDYEIH |
| | | WVRQAPGQGLEWIGVNDPESGGTFYNQKFDGRATL |
| | | TADKSTSTAYMELSSLRSEDTAVYYCTRYDKWESF |
| | | YGMDFWGQGTTVTVSS |
| J420M2S2-47VH | 171 | EVQLVQSGAEVKKPGSSVKVSCKASGYTFTDYEIH |
| | | WVRQAPGQGLEWIGVNDPESGGTFYNQKFDGRATL |
| | | TADKSTSTAYMELSSLRSEDTAVYYCTRYDKWDGF |
| | | NGMDYWGQGTTVTVSS |
| J420M2S2-50VH | 172 | EVQLVQSGAEVKKPGSSVKVSCKASGYTFTDYEIH |
| | | WVRQAPGQGLEWIGVNDPESGGTFYNQKFDGRATL |
| | | TADKSTSTAYMELSSLRSEDTAVYYCTRYDKWDSF |
| | | YGMDYWGQGTTVTVSS |
| J420M2S2-51VH | 173 | EVQLVQSGAEVKKPGSSVKVSCKASGYTFTDYEIH |
| | | WVRQAPGQGLEWIGVNDPESGGTFYNQKFDGRATL |
| | | TADKSTSTAYMELSSLRSEDTAVYYCTRYDKYESF |
| | | YGMDYWGQGTTVTVSS |
| J420M2S2-53VH | 174 | EVQLVQSGAEVKKPGSSVKVSCKASGYTFTDYEIH |
| | | WVRQAPGQGLEWIGVNDPESGGTFYNQKFDGRATL |
| | | TADKSTSTAYMELSSLRSEDTAVYYCTRYDRYWSF |
| | | NGMDYWGQGTTVTVSS |
| J420M2S2-56VH | 175 | EVQLVQSGAEVKKPGSSVKVSCKASGYTFTDYEIH |
| | | WVRQAPGQGLEWIGVNDPESGGTFYNQKFDGRATL |
| | | TADKSTSTAYMELSSLRSEDTAVYYCTRYYKWDSF |
| | | LGMDFWGQGTTVTVSS |
| J420M2S2-57VH | 176 | EVQLVQSGAEVKKPGSSVKVSCKASGYTFTDYEIH |
| | | WVRQAPGQGLEWIGVNDPESGGTFYNQKFDGRATL |
| | | TADKSTSTAYMELSSLRSEDTAVYYCTRYDMWESF |
| | | NGMDYWGQGTTVTVSS |
| J420M2S2-58VH | 177 | EVQLVQSGAEVKKPGSSVKVSCKASGYTFTDYEIH |
| | | WVRQAPGQGLEWIGVNDPESGGTFYNQKFDGRATL |
| | | TADKSTSTAYMELSSLRSEDTAVYYCTRYYKWWGF |
| | | MGMDYWGQGTTVTVSS |
| J420M2S2-60VH | 178 | EVQLVQSGAEVKKPGSSVKVSCKASGYTFTDYEIH |
| | | WVRQAPGQGLEWIGVNDPESGGTFYNQKFDGRATL |
| | | TADKSTSTAYMELSSLRSEDTAVYYCTRYYRYWGF |
| | | EGMDYWGQGTTVTVSS |
| J420M2S2-64VH | 179 | EVQLVQSGAEVKKPGSSVKVSCKASGYTFTDYEIH |
| | | WVRQAPGQGLEWIGVNDPESGGTFYNQKFDGRATL |
| | | TADKSTSTAYMELSSLRSEDTAVYYCTRYDKYWSF |
| | | QGMDYWGQGTTVTVSS |
| J420M2S2-65VH | 180 | EVQLVQSGAEVKKPGSSVKVSCKASGYTFTDYEIH |
| | | WVRQAPGQGLEWIGVNDPESGGTFYNQKFDGRATL |
| | | TADKSTSTAYMELSSLRSEDTAVYYCTRYDKYESF |
| | | EGMDYWGQGTTVTVSS |
| J420M2S2-67VH | 181 | EVQLVQSGAEVKKPGSSVKVSCKASGYTFTDYEIH |
| | | WVRQAPGQGLEWIGVNDPESGGTFYNQKFDGRATL |
| | | TADKSTSTAYMELSSLRSEDTAVYYCTRYDKWMSF |
| | | SGMDYWGQGTTVTVSS |
| J420M2S2-71VH | 182 | EVQLVQSGAEVKKPGSSVKVSCKASGYTFTDYEIH |
| | | WVRQAPGQGLEWIGVNDPESGGTFYNQKFDGRATL |
| | | TADKSTSTAYMELSSLRSEDTAVYYCTRYDKFYGF |
| | | NGMDYWGQGTTVTVSS |
| J420M2S2-72VH | 183 | EVQLVQSGAEVKKPGSSVKVSCKASGYTFTDYEIH |
| | | WVRQAPGQGLEWIGVNDPESGGTFYNQKFDGRATL |
| | | TADKSTSTAYMELSSLRSEDTAVYYCTRYYKWDSF |
| | | YGMDAWGQGTTVTVSS |
| J420M2S2-79VH | 184 | EVQLVQSGAEVKKPGSSVKVSCKASGYTFTDYEIH |
| | | WVRQAPGQGLEWIGVNDPESGGTFYNQKFDGRATL |
| | | TADKSTSTAYMELSSLRSEDTAVYYCTRYSKWDSF |
| | | SGMDYWGQGTTVTVSS |
| J420M2S2-80VH | 185 | EVQLVQSGAEVKKPGSSVKVSCKASGYTFTDYEIH |
| | | WVRQAPGQGLEWIGVNDPESGGTFYNQKFDGRATL |
| | | TADKSTSTAYMELSSLRSEDTAVYYCTRYDKWESF |
| | | YGMDYWGQGTTVTVSS |
| J420M2S2-87VH | 186 | EVQLVQSGAEVKKPGSSVKVSCKASGYTFTDYEIH |
| | | WVRQAPGQGLEWIGVNDPESGGTFYNQKFDGRATL |
| | | TADKSTSTAYMELSSLRSEDTAVYYCTRYDKWWSF |
| | | SGMDYWGQGTTVTVSS |
| J420M2S2-89VH | 187 | EVQLVQSGAEVKKPGSSVKVSCKASGYTFTDYEIH |
| | | WVRQAPGQGLEWIGVNDPESGGTFYNQKFDGRATL |
| | | TADKSTSTAYMELSSLRSEDTAVYYCTRYDKWESF |
| | | AGMDYWGQGTTVTVSS |
| J420M2S2-95VH | 188 | EVQLVQSGAEVKKPGSSVKVSCKASGYTFTDYEIH |
| | | WVRQAPGQGLEWIGVNDPESGGTFYNQKFDGRATL |
| | | TADKSTSTAYMELSSLRSEDTAVYYCTRYYRWESF |
| | | QGMDYWGQGTTVTVSS |
| J420M2S2-9VH | 189 | EVQLVQSGAEVKKPGSSVKVSCKASGYTFTDYEIH |
| | | WVRQAPGQGLEWIGVNDPESGGTFYNQKFDGRATL |
| | | TADKSTSTAYMELSSLRSEDTAVYYCTRYDKYESL |
| | | NGMDYWGQGTTVTVSS |
| J420M2S3-12VH | 190 | EVQLVQSGAEVKKPGSSVKVSCKASGYTFTDYEIH |
| | | WVRQAPGQGLEWIGVNDPESGGTFYNQKFDGRATL |
| | | TADKSTSTAYMELSSLRSEDTAVYYCTRYWKWDSF |
| | | FGMDYWGQGTTVTVSS |
| J420M2S3-21VH | 191 | EVQLVQSGAEVKKPGSSVKVSCKASGYTFTDYEIH |
| | | WVRQAPGQGLEWIGVNDPESGGTFYNQKFDGRATL |
| | | TADKSTSTAYMELSSLRSEDTAVYYCTRYDKWESF |
| | | SGMDYWGQGTTVTVSS |
| J420M2S3-25VH | 192 | EVQLVQSGAEVKKPGSSVKVSCKASGYTFTDYEIH |
| | | WVRQAPGQGLEWIGVNDPESGGTFYNQKFDGRATL |
| | | TADKSTSTAYMELSSLRSEDTAVYYCTRYDKYVGF |
| | | EGMDYWGQGTTVTVSS |
| J420M2S3-27VH | 193 | EVQLVQSGAEVKKPGSSVKVSCKASGYTFTDYEIH |
| | | WVRQAPGQGLEWIGVNDPESGGTFYNQKFDGRATL |
| | | TADKSTSTAYMELSSLRSEDTAVYYCTRYDKFWSF |
| | | NGMDYWGQGTTVTVSS |
| J420M2S3-29VH | 194 | EVQLVQSGAEVKKPGSSVKVSCKASGYTFTDYEIH |
| | | WVRQAPGQGLEWIGVNDPESGGTFYNQKFDGRATL |
| | | TADKSTSTAYMELSSLRSEDTAVYYCTRYSKWDSF |
| | | QGMDYWGQGTTVTVSS |
| J420M2S3-32VH | 195 | EVQLVQSGAEVKKPGSSVKVSCKASGYTFTDYEIH |
| | | WVRQAPGQGLEWIGVNDPESGGTFYNQKFDGRATL |
| | | TADKSTSTAYMELSSLRSEDTAVYYCTRYFKWDSF |
| | | EGMDYWGQGTTVTVSS |
| J420M2S3-39VH | 196 | EVQLVQSGAEVKKPGSSVKVSCKASGYTFTDYEIH |
| | | WVRQAPGQGLEWIGVNDPESGGTFYNQKFDGRATL |
| | | TADKSTSTAYMELSSLRSEDTAVYYCTRYSKWNSF |
| | | DGMDYWGQGTTVTVSS |
| J420M2S3-3VH | 197 | EVQLVQSGAEVKKPGSSVKVSCKASGYTFTDYEIH |
| | | WVRQAPGQGLEWIGVNDPESGGTFYNQKFDGRATL |
| | | TADKSTSTAYMELSSLRSEDTAVYYCTRYSKWDSF |
| | | DGMDYWGQGTTVTVSS |
| J420M2S3-55VH | 198 | EVQLVQSGAEVKKPGSSVKVSCKASGYTFTDYEIH |
| | | WVRQAPGQGLEWIGVNDPESGGTFYNQKFDGRATL |
| | | TADKSTSTAYMELSSLRSEDTAVYYCTRYDKWESF |
| | | NGMDYWGQGTTVTVSS |
| J420M2S3-57VH | 199 | EVQLVQSGAEVKKPGSSVKVSCKASGYTFTDYEIH |
| | | WVRQAPGQGLEWIGVNDPESGGTFYNQKFDGRATL |
| | | TADKSTSTAYMELSSLRSEDTAVYYCTRYWKWDSF |
| | | YGMDSWGQGTTVTVSS |
| J420M2S3-68VH | 200 | EVQLVQSGAEVKKPGSSVKVSCKASGYTFTDYEIH |
| | | WVRQAPGQGLEWIGVNDPESGGTFYNQKFDGRATL |
| | | TADKSTSTAYMELSSLRSEDTAVYYCTRYDKFDSF |
| | | YGMDYWGQGTTVTVSS |
| J420M2S3-70VH | 201 | EVQLVQSGAEVKKPGSSVKVSCKASGYTFTDYEIH |
| | | WVRQAPGQGLEWIGVNDPESGGTFYNQKFDGRATL |
| | | TADKSTSTAYMELSSLRSEDTAVYYCTRYDKWEGF |
| | | RGMDLWGQGTTVTVSS |
| J420M2S3-73VH | 202 | EVQLVQSGAEVKKPGSSVKVSCKASGYTFTDYEIH |
| | | WVRQAPGQGLEWIGVNDPESGGTFYNQKFDGRATL |
| | | TADKSTSTAYMELSSLRSEDTAVYYCTRYEKWDSF |
| | | NGMDYWGQGTTVTVSS |
| J420M2S3-76VH | 203 | EVQLVQSGAEVKKPGSSVKVSCKASGYTFTDYEIH |
| | | WVRQAPGQGLEWIGVNDPESGGTFYNQKFDGRATL |
| | | TADKSTSTAYMELSSLRSEDTAVYYCTRYYKWESF |
| | | QGMDYWGQGTTVTVSS |
| J420M2S3-77VH | 204 | EVQLVQSGAEVKKPGSSVKVSCKASGYTFTDYEIH |
| | | WVRQAPGQGLEWIGVNDPESGGTFYNQKFDGRATL |
| | | TADKSTSTAYMELSSLRSEDTAVYYCTRYDKFYSF |
| | | NGMDYWGQGTTVTVSS |
| J420M2S3-94VH | 205 | EVQLVQSGAEVKKPGSSVKVSCKASGYTFTDYEIH |
| | | WVRQAPGQGLEWIGVNDPESGGTFYNQKFDGRATL |
| | | TADKSTSTAYMELSSLRSEDTAVYYCTRYNKWDSF |
| | | LGMDYWGQGTTVTVSS |
| J425M2S2-29VH | 206 | EVQLVQSGAEVKKPGSSVKVSCKASGYTFTDYEIH |
| | | WVRQAPGQGLEWIGVNDPESGGTFYNQKFDGRATL |
| | | TADKSTSTAYMELSSLRSEDTAVYYCTRYDKYESF |
| | | NGMDYWGQGTTVTVSS |
| J425M2S2-41VH | 207 | EVQLVQSGAEVKKPGSSVKVSCKASGYTFTDYEIH |
| | | WVRQAPGQGLEWIGVNDPESGGTFYNQKFDGRATL |
| | | TADKSTSTAYMELSSLRSEDTAVYYCTRYYRYESF |
| | | YGMDYWGKGTTVTVSS |
| J427M2S3-88VH | 208 | EVQLVQSGAEVKKPGSSVKVSCKASGYTFTDYEIH |
| | | WVRQAPGQGLEWIGVNDPESGGTFYNQKFDGRATL |
| | | TADKSTSTAYMELSSLRSEDTAVYYCTRYYRYESF |
| | | YGMDYWGQGTTVTVSS |
| J427M2S3-91VH | 209 | EVQLVQSGAEVKKPGSSVKVSCKASGYTFTDYEIH |
| | | WVRQAPGQGLEWIGVNDPESGGTFYNQKFDGRATL |
| | | TADKSTSTAYMELSSLRSEDTAVYYCTRYYRYESF |
| | | YGMDYWGQGTTVTVSS |
| J439M1S2(H)3- | 210 | EVQLVQSGAEVKKPGSSVKVSCKASGYTFTDYEIH |
| A12VH | | WVRQAPGQGLEWMGVNDPESGGTLYNQKFDGRVTL |
| | | TADESTSTAYMELSSLRSEDTAVYYCTRYDRYWSF |
| | | NGMDYWGQGTTVTVSS |
| J439M1S2(H)3- | 211 | EVQLVQSGAEVKKPGSSVKVSCKASGYTFTDYEIH |
| A3VH | | WVRQAPGQGLEWIGVNDPDSGGTLYNQKFDGRVTL |
| | | TADESTSTAYMELSSLRSEDTAVYYCTRYWKWDSF |
| | | FGMDYWGQGTTVTVSS |
| J439M1S2(H)3- | 212 | EVQLVQSGAEVKKPGSSVKVSCKASGYTFTDYEIH |
| B18VH | | WVRQAPGQGLEWIGVNDPESGGTFYNQKFDGRVTL |
| | | TADKSTSTAYMELSSLRSEDTAVYYCTRYDKWYSF |
| | | EGMDIWGQGTTVTVSS |
| J439M1S2(H)3- | 213 | EVQLVQSGAEVKKPGSSVKVSCKASGYTFPDYEIH |
| B19VH | | WVRQAPGQGLEWIGVNDPESGGTFYNQKFDGRATL |
| | | TADESTSTAYMELSSLRSEDTAVYYCTRYDKWESF |
| | | NGMDYWGQGTTVTVSS |
| J439M1S2(H)3- | 214 | EVQLVQSGAEVKKPGSSVKVSCKASGYTFTDYEIH |
| B23VH | | WVRQAPGQGLEWIGVNDPESGGTYYNQKFDGRATL |
| | | TADESTSTAYMELSSLRSEDTAVYYCTRYSKWDSF |
| | | QGMDYWGQGTTVTVSS |
| J439M1S2(H)3- | 215 | EVQLVQSGAEVKKPGSSVKVSCKASGYTFDDYEIH |
| B2VH | | WVRQAPGQGLEWIGVNDPESGGTFYNQKFDGRATL |
| | | TADESTSTAYMELSSLRSEDTAVYYCTRYSKWDSF |
| | | LGMDYWGQGTTVTVSS |
| J439M1S2(H)3- | 216 | EVQLVQSGAEVKKPGSSVKVSCKASGYTFTDYEIH |
| B38VH | | WVRQAPGQGLEWMGVNDPESGGTFYNQKFDGRVTL |
| | | TADESTSTAYMELSSLRSEDTAVYYCTRYDKYWSF |
| | | QGMDYWGQGTTVTVSS |
| J439M1S2(H)3- | 217 | EVQLVQSGAEVKKPGSSVKVSCKASGYTFDDYEIH |
| B40VH | | WVRQAPGQGLEWIGVNDPESGGTFYNQKFDGRATL |
| | | TADKSTSTAYMELSSLRSEDTAVYYCTRYDKYWSF |
| | | EGMDYWGQGTTVTVSS |
| J439M1S2(H)3- | 218 | EVQLVQSGAEVKKPGSSVKVSCKASGYTFSDYEIH |
| B51VH | | WVRQAPGQGLEWIGVNDPESGGTFYNQKFDGRATL |
| | | TADESTSTAYMELSSLRSEDTAVYYCTRYDKWYSF |
| | | EGMDIWGQGTTVTVSS |
| J439M1S2(H)3- | 219 | EVQLVQSGAEVKKPGSSVKVSCKASGYTFDDYEIH |
| B52VH | | WVRQAPGQGLEWMGVNDPESGGTFYNQKFDGRVTL |
| | | TADKSTSTAYMELSSLRSEDTAVYYCTRYDKWESF |
| | | NGMDEWGQGTTVTVSS |
| J439M1S2(H)3- | 220 | EVQLVQSGAEVKKPGSSVKVSCKASGYTFTDYEIH |
| B5VH | | WVRQAPGQGLEWIGVNDPESGGTFYNQKFDGRVTL |
| | | TADESTSTAYMELSSLRSEDTAVYYCTRYDKWDSF |
| | | YGMDYWGQGTTVTVSS |
| J439M1S2(H)3- | 221 | EVQLVQSGAEVKKPGSSVKVSCKASGYTFNDYEIH |
| B62VH | | WVRQAPGQGLEWIGVNDPESGGTYYNQKFDGRATL |
| | | TADESTSTAYMELSSLRSEDTAVYYCTRYDKWYSF |
| | | EGMDIWGQGTTVTVSS |
| J439M1S2(H)3- | 222 | EVQLVQSGAEVKKPGSSVKVSCKASGYTFTDYEIH |
| C13VH | | WVRQAPGQGLEWIGVNDPESGGTFYNQKFDGRVTL |
| | | SADESTSTAYMELSSLRSEDTAVYYCTRYDKYWSF |
| | | EGMDYWGQGTTVTVSS |
| J439M1S2(H)3- | 223 | EVQLVQSGAEVKKPGSSVKVSCKASGYTFDDYEIH |
| C15VH | | WVRQAPGQGLEWMGVNDPESGGTFYNQKFDGRVTL |
| | | TADKSTSTAYMELSSLRSEDTAVYYCTRYDKWESF |
| | | NGMDYWGQGTTVTVSS |
| J439M1S2(H)3- | 224 | EVQLVQSGAEVKKPGSSVKVSCKASGYTFTDYEIH |
| C17VH | | WVRQAPGQGLEWIGVNDPDSGGTLYNQKFDGRVTL |
| | | TADESTSTAYMELSSLRSEDTAVYYCTRYDKWYSF |
| | | EGMDIWGQGTTVTVSS |
| J439M1S2(H)3- | 225 | EVQLVQSGAEVKKPGSSVKVSCKASGYTFDDYEIH |
| C19VH | | WVRQAPGQGLEWIGVNDPESGGTFYNQKFDGRATL |
| | | TADESTSTAYMELSSLRSEDTAVYYCTRYDKYWSF |
| | | EGMDYWGQGTTVTVSS |
| J439M1S2(H)3- | 226 | EVQLVQSGAEVKKPGSSVKVSCKASGYTFADYEIH |
| C20VH | | WVRQAPGQGLEWIGVNDPESGGTFYNQKFDGRVTL |
| | | TADESTSTAYMELSSLRSEDTAVYYCTRYDKYWSF |
| | | EGMDYWGQGTTVTVSS |
| J439M1S2(H)3- | 227 | EVQLVQSGAEVKKPGSSVKVSCKASGYTFDDYEIH |
| C21VH | | WVRQAPGQGLEWMGVNDPESGGTFYNQKFDGRVTL |
| | | TADESTSTAYMELSSLRSEDTAVYYCTRYEKWDSF |
| | | NGMDYWGQGTTVTVSS |
| J439M1S2(H)3- | 228 | EVQLVQSGAEVKKPGSSVKVSCKASGYTFTDYEIH |
| C25VH | | WVRQAPGQGLEWMGVNDPESGGTFYNQKFDGRITL |
| | | TADESTSTAYMELSSLRSEDTAVYYCTRYDKWYSF |
| | | EGMDIWGQGTTVTVSS |
| J439M1S2(H)3- | 229 | EVQLVQSGAEVKKPGSSVKVSCKASGYTFDDYEIH |
| C4VH | | WVRQAPGQGLEWMGVNDPESGGTFYNQKFDGRVTL |
| | | TADESTSTAYMELSSLRSEDTAVYYCTRYDKYWSL |
| | | NGMDEWGQGTTVTVSS |
| J439M1S2(H)3- | 230 | EVQLVQSGAEVKKPGSSVKVSCKASGYTFTDYEIH |
| C5VH | | WVRQAPGQGLEWIGVNDPDSGGTLYNQKFDGRVTL |
| | | TADESTSTAYMELSSLRSEDTAVYYCTRYDRYWSF |
| | | NGMDYWGQGTTVTVSS |
| J439M1S2(H)3- | 231 | EVQLVQSGAEVKKPGSSVKVSCKASGYTFSDYEIH |
| C6VH | | WVRQAPGQGLEWMGVNDPESGGTFYNQKFDGRVTL |
| | | TADESTSTAYMELSSLRSEDTAVYYCTRYDKYWSF |
| | | EGMDYWGQGTTVTVSS |
| J439M1S2(H)3- | 232 | EVQLVQSGAEVKKPGSSVKVSCKASGYTFTDYEIH |
| C9VH | | WVRQAPGQGLEWIGVNDPESGGTFYNQKFDGRVTL |
| | | TADESTSTAYMELSSLRSEDTAVYYCTRYDKYWSF |
| | | NGMDYWGQGTTVTVSS |
| J439M1S2(H)3- | 233 | EVQLVQSGAEVKKPGSSVKVSCKASGYTFPDYEIH |
| D11VH | | WVRQAPGQGLEWIGVNDPESGGTFYNQKFDGRVTL |
| | | TADESTSTAYMELSSLRSEDTAVYYCTRYDKWYSF |
| | | EGMDIWGQGTTVTVSS |
| J439M1S2(H)3- | 234 | EVQLVQSGAEVKKPGSSVKVSCKASGYTFTDYEIH |
| D12VH | | WVRQAPGQGLEWIGVNDPESGGTFYNQKFDGRVTL |
| | | TADESTSTAYMELSSLRSEDTAVYYCTRYDKWYSF |
| | | EGMDIWGQGTTVTVSS |
| J439M1S2(H)3- | 235 | EVQLVQSGAEVKKPGSSVKVSCKASGYTFEDYEIH |
| D15VH | | WVRQAPGQGLEWIGVNDPDSGGTLYNQKFDGRVTL |
| | | TADKSTSTAYMELSSLRSEDTAVYYCTRYSKWDSF |
| | | LGMDYWGQGTTVTVSS |
| J439M1S2(H)3- | 236 | EVQLVQSGAEVKKPGSSVKVSCKASGYTFTDYEIH |
| D18VH | | WVRQAPGQGLEWMGVNDPESGGTFYNQKFDGRVTL |
| | | TADESTSTAYMELSSLRSEDTAVYYCTRYDKWESF |
| | | NGMDYWGQGTTVTVSS |
| J439M1S2(H)3- | 237 | EVQLVQSGAEVKKPGSSVKVSCKASGYTFTDYEIH |
| D24VH | | WVRQAPGQGLEWIGVNDPESGGTFYNQKFDGRATL |
| | | TADESTSTAYMELSSLRSEDTAVYYCTRYDKWYSF |
| | | EGMDIWGQGTTVTVSS |
| J439M1S2(H)3- | 238 | EVQLVQSGAEVKKPGSSVKVSCKASGYTFADYEIH |
| D25VH | | WVRQAPGQGLEWIGVNDPESGGTFYNQKFDGRATL |
| | | TADESTSTAYMELSSLRSEDTAVYYCTRYDKWYSF |
| | | EGMDIWGQGTTVTVSS |
| J439M1S2(H)3- | 239 | EVQLVQSGAEVKKPGSSVKVSCKASGYTFDDYEIH |
| D29VH | | WVRQAPGQGLEWIGVNDPESGGTLYNQKFDGRVTL |
| | | TTDKSTSTAYMELSSLRSEDTAVYYCTRYDKWYSF |
| | | EGMDIWGQGTTVTVSS |
| J439M1S2(H)3- | 240 | EVQLVQSGAEVKKPGSSVKVSCKASGYTFTDYEIH |
| D2VH | | WVRQAPGQGLEWIGVNDPESGGTFYNQKFDGRATL |
| | | TADESTSTAYMELSSLRSEDTAVYYCTRYDKWESF |
| | | NGMDYWGQGTTVTVSS |
| J439M1S2(H)3- | 241 | EVQLVQSGAEVKKPGSSVKVSCKASGYTFSDYEIH |
| D30VH | | WVRQAPGQGLEWMGVNDPESGGTFYNQKFDGRVTL |
| | | TADESTSTAYMELSSLRSEDTAVYYCTRYDKWYSF |
| | | EGMDIWGQGTTVTVSS |
| J439M1S2(H)3- | 242 | EVQLVQSGAEVKKPGSSVKVSCKASGYTFTDYEIH |
| D36VH | | WVRQAPGQGLEWMGVNDPESGGTFYNQKFDGRVTL |
| | | TADESTSTAYMELSSLRSEDTAVYYCTRYDKWYSF |
| | | EGMDIWGQGTTVTVSS |
| J439M1S2(H)3- | 243 | EVQLVQSGAEVKKPGSSVKVSCKASGYTFDDYEIH |
| D38VH | | WVRQAPGQGLEWMGVNDPESGGTFYNQKFDGRVTL |
| | | TADESTSTAYMELSSLRSEDTAVYYCTRYDKWDSF |
| | | YGMDYWGQGTTVTVSS |
| J439M1S2(H)3- | 244 | EVQLVQSGAEVKKPGSSVKVSCKASGYTFDDYEIH |
| D3VH | | WVRQAPGQGLEWMGVNDPESGGTFYNQKFDGRVTL |
| | | TADESTSTAYMELSSLRSEDTAVYYCTRYDKWYSF |
| | | EGMDIWGQGTTVTVSS |
| J439M1S2(H)3- | 245 | EVQLVQSGAEVRKPGSSVKVSCKASGYTFEDYEIH |
| D6VH | | WVRQAPGQGLEWMGVIDPESGGTLYNQKFDGRVTL |
| | | TADESTSTAYMELSSLRSEDTAVYYCTRYDKWYSF |
| | | EGMDIWGQGTTVTVSS |
| J439M1S2(H)3- | 246 | EVQLVQSGAEVKKPGSSVKVSCKASGYTFDDYEIH |
| D8VH | | WVRQAPGQGLEWMGVNDPESGGTFYNQKFDGRVTL |
| | | TADESTSTAYMELSSLRSEDTAVYYCTRYDKWWSF |
| | | SGMDYWGQGTTVTVSS |
| J439M1S2(H)3- | 247 | EVQLVQSGAEVKKPGSSVKVSCKASGYTFTDYEIH |
| D9VH | | WVRQAPGQGLEWMGVNDPESGGTFYNQKFDGRVTL |
| | | TADESTSTAYMELSSLRSEDTAVYYCTRYSKWDSF |
| | | DGMDYWGQGTTVTVSS |
| J439M1S2(H)R4- | 248 | EVQLVQSGAEVKKPGSSVKVSCKASGYTFADYEIH |
| A10VH | | WVRQAPGQGLEWIGVNDPESGGTFYNQKFDGRATL |
| | | TADKSTSTAYMELSSLRSEDTAVYYCTRYDKWESF |
| | | NGMDYWGQGTTVTVSS |
| J439M1S2(H)R4- | 249 | EVQLVQSGAEVKKPGSSVKVSCKASGYTFADYEIH |
| A11VH | | WVRQAPGQGLEWIGVNDPESGGTFYNQKFDGRATL |
| | | TADKSTSTAYMELSSLRSEDTAVYYCTRYSKWDSF |
| | | DGMDYWGQGTTVTVSS |
| J439M1S2(H)R4- | 250 | EVQLVQSGAEVKKPGSSVKVSCKASGYTFTDYEIH |
| A12VH | | WVRQAPGQGLEWIGVNDPESGGTFYNQKFDGRATL |
| | | TADKSTSTAYMELSSLRSEDTAVYYCTRYDKWYSF |
| | | EGMDIWGQGTTVTVSS |
| J439M1S2(H)R4- | 251 | EVQLVQSGAEVKKPGSSVKVSCKASGYTFTDYEIH |
| A1VH | | WVRQAPGQGLEWIGVNDPESGGTFYNQKFDGRATL |
| | | TADESTSTAYMELSSLRSEDTAVYYCTRYDKWDSF |
| | | YGMDCWGQGTTVTVSS |
| J439M1S2(H)R4- | 252 | EVQLVQSGAEVKKPGSSVKVSCKASGYTFSDYEIH |
| A4VH | | WVRQAPGQGLEWMGVNDPESGGTFYNQKFDGRVTL |
| | | TADESTSTAYMELSSLRSEDTAVYYCTRYWKWDSF |
| | | YGMDSWGQGTTVTVSS |
| J439M1S2(H)R4- | 253 | EVQLVQSGAEVKKPGSSVKVSCKASGYTFDDYEIH |
| A5VH | | WVRQAPGQGLEWMGVNDPESGGTFYNQKFDGRVTL |
| | | TADKSTSTAYMELSSLRSEDTAVYYCTRYDKWYSF |
| | | EGMDIWGQGTTVTVSS |
| J439M1S2(H)R4- | 254 | EVQLVQSGAEVKKPGSSVKVSCKASGYTFTDYEIH |
| A6VH | | WVRQAPGQGLEWIGVNDPDSGGTLYNQKFDGRVTL |
| | | TADESTSTAYMELSSLRSEDTAVYYCTRYDKWESF |
| | | NGMDYWGQGTTVTVSS |
| J439M1S2(H)R4- | 255 | EVQLVQSGAEVKKPGSSVKVSCKASGYTFTDYEIH |
| A9VH | | WVRQAPGQGLEWIGVNDPESGGTFYNQKFDGRATL |
| | | TADESTSTAYMELSSLRSEDTAVYYCTRYDKWDGF |
| | | NGMDYWGQGTTVTVSS |
| J439M1S2(H)R4- | 256 | EVQLVQSGAEVKKPGSSVKVSCKASGYTFTDYEIH |
| B10VH | | WVRQAPGQGLEWIGVNDPESGGTFYNQKFDGRATL |
| | | TADKSTSTAYMELSSLRSEDTAVYYCTRYSKWDSF |
| | | LGMDYWGQGTTVTVSS |
| J439M1S2(H)R4- | 257 | EVQLVQSGAEVKKPGSSVKVSCKASGYTFSDYEIH |
| B2VH | | WVRQAPGQGLEWIGVNDPDSGGTLYNQKFDGRVTL |
| | | TADESTSTAYMELSSLRSEDTAVYYCTRYDKWEGF |
| | | RGMDLWGQGTTVTVSS |
| J439M1S2(H)R4- | 258 | EVQLVQSGAEVKKPGSSVKVSCKASGYTFTDYEIH |
| B5VH | | WVRQAPGQRLEWIGVNDPESGGTFYNQKFDGRVTL |
| | | TADESTSTAYMELSSLRSEDTAVYYCTRYDKWESF |
| | | NGMDYWGQGTTVTVSS |
| J439M1S2(H)R4- | 259 | EVQLVQSGAEVKKPGSSVKVSCKASGYTFDDYEIH |
| B7VH | | WVRQAPGQGLEWIGVIDPESGGTLYNQKFDGRVTI |
| | | TADESTSTAYMELSSLRSEDTAVYYCTRYDRYWSF |
| | | EGMDYWGQGTTVTVSS |
| J439M1S2(H)R4- | 260 | EVQLVQSGAEVKKPGSSVKVSCKASGYTFDDYEIH |
| B9VH | | WVRQAPGQGLEWIGVNDPESGGTLYNQKFDGRVTL |
| | | TADKSTSTAYMELSSLRSEDTAVYYCTRYDKWYSF |
| | | EGMDIWGQGTTVTVSS |
| J439M1S2(H)R4- | 261 | EVQLVQSGAEVKKPGSSVKVSCKASGYTFDDYEIH |
| C11VH | | WVRQAPGQGLEWIGVNDPESGGTLYNQKFDGRVTL |
| | | TADKSTSTAYMELSSLRSEDTAVYYCTRYDKWYSF |
| | | EGMDIWGQGTTVTVSS |
| J439M1S2(H)R4- | 262 | EVQLVQSGAEVKKPGSSVKVSCKASGYTFDEYEIH |
| C12VH | | WVRQAPGQGLEWMGVNDPESGGTLYNQKFDGRVTL |
| | | TADKSTSTAYMELSSLRSEDTAVYYCTRYDKWDSF |
| | | YGMDYWGQGTTVTVSS |
| J439M1S2(H)R4- | 263 | EVQLVQSGAEVKKPGSSVKVSCKASGYTFTDYEIH |
| C2VH | | WVRQAPGQGLEWIGVNDPESGGTLYNQKFDGRATI |
| | | TADESTSTAYMELSSLRSEDTAVYYCTRYYKWDSF |
| | | EGMDYWGQGTTVTVSS |
| J439M1S2(H)R4- | 264 | EVQLVQSGAEVKKPGSSVKVSCKASGYTFDDYEIH |
| C4VH | | WVRQAPGQGLEWMGVIDPESGGTLYNQKFDGRVTL |
| | | TADKSTSTAYMELSSLRSEDTAVYYCTRYDKWYSF |
| | | EGMDIWGQGTTVTVSS |
| J439M1S2(H)R4- | 265 | EVQLVQSGAEVKKPGSSVKVSCKASGYTFDDYEIH |
| C5VH | | WVRQAPGQGLEWIGVNDPESGGTFYNQKFDGRVTL |
| | | TADKSTSTAYMELSSLRSEDTAVYYCTRYDKYWSF |
| | | EGMDYWGQGTTVTVSS |
| J439M1S2(H)R4- | 266 | EVQLVQSGAEVKKPGSSVKVSCKASGYTFDDYEIH |
| C7VH | | WVRQAPGQGLEWIGVNDPESGGTMYNQKFDGRVTI |
| | | TADKSTSTAYMELSSLRSEDTAVYYCTRYDKWDSF |
| | | YGMDCWGQGTTVTVSS |
| J439M1S2(H)R4- | 267 | EVQLVQSGAEVKKPGSSVKVSCKASGYTFDDYEIH |
| C8VH | | WVRQAPGQGLEWIGVNDPDSGGTLYNQKFDGRVTI |
| | | TADKSTSTAYMELSSLRSEDTAVYYCTRYDKWESF |
| | | NGMDYWGQGTTVTVSS |
| J439M1S2(H)R4- | 268 | EVQLVQSGAEVKKPGSSVKVSCKASGYTFDDYEIH |
| D10VH | | WVRQAPGQGLEWMGVIDPDSGGTLYNQKFDGRVTL |
| | | TADKSTSTAYMELSSLRSEDTAVYYCTRYDKWDSF |
| | | YGMDYWGQGTTVTVSS |
| J439M1S2(H)R4- | 269 | EVQLVQSGAEVKKPGSSVKVSCKASGYTFDDYEIH |
| D11VH | | WVRQAPGQGLEWMGVIDPESGGILYNQKFDGRVTL |
| | | TADKSTSTAYMELSSLRSEDTAVYYCTRYDKWESF |
| | | AGMDYWGQGTTVTVSS |
| J439M1S2(H)R4- | 270 | EVQLVQSGAEVKKPGSSVKVSCKASGYTFTDYEIH |
| D2VH | | WVRQAPGQGLEWMGVNDPESGGTFYNQKFDGRVTL |
| | | TADKSTSTAYMELSSLRSEDTAVYYCTRYDRWDSF |
| | | NGMDEWGQGTTVTVSS |
| J439M1S2(H)R4- | 271 | EVQLVQSGAEVKKPGSSVKVSCKASGYTFTDYEIH |
| D3VH | | WVRQAPGQGLEWIGVNDPESGGTFYNQKFDGRVTL |
| | | TADESTSTAYMELSSLRSEDTAVYYCTRYDKWESF |
| | | NGMDYWGQGTTVTVSS |
| J439M1S2(H)R4- | 272 | EVQLVQSGAEVKKPGSSVKVSCKASGYTFTDYEIH |
| D4VH | | WVRQAPGQGLEWMGVNDPESGGTFYNQKFDGRVTL |
| | | TADESTSTAYMELSSLRSEDTAVYYCTRYWKWDSF |
| | | YGMDSWGQGTTVTVSS |
| J439M1S2(H)R4- | 273 | EVQLVQSGAEVKKPGSSVKVSCKASGYTFSDYEIH |
| D5VH | | WVRQAPGQGLEWMGVNDPESGGTFYNQKFDGRVTL |
| | | TADESTSTAYMELSSLRSEDTAVYYCTRYDKWDSF |
| | | YGMDYWGQGTTVTVSS |
| J439M1S2(H)R4- | 274 | EVQLVQSGAEVKKPGSSVKVSCKASGYTFDDYEIH |
| D6VH | | WVRQAPGQGLEWIGVNDPESGGTLYNQKFDGRVTI |
| | | TADESTSTAYMELSSLRSEDTAVYYCTRYDKWESF |
| | | SGMDYWGQGTTVTVSS |
| J439M1S2(H)R4- | 275 | EVQLVQSGAEVKKPGSSVKVSCKASGYTFDDYEIH |
| D8VH | | WVRQAPGQGLEWIGVNDPESGGTFYNQKFDGRATL |
| | | TADKSTSTAYMELSSLRSEDTAVYYCTRYDKWYSF |
| | | EGMDIWGQGTTVTVSS |
| J439M1S2(H)R4- | 276 | EVQLVQSGAEVKKPGSSVKVSCKASGYTFDDYEIH |
| D9VH | | WVRQAPGQGLEWMGVNDPESGGTMYNQKFDGRVTL |
| | | TADKSTSTAYMELSSLRSEDTAVYYCTRYDKWDSF |
| | | YGMDCWGQGTTVTVSS |
| J439M1S2(H)R5- | 277 | EVQLVQSWAEVKKPGSSVKVSCKASGYTFTEYEIH |
| E11VH | | WVRQAPGQGLEWIGVNDPESGGTFYNQKFDGRVTL |
| | | TADESTSTAYMELSSLRSEDTAVYYCTRYDKWESF |
| | | NGMDYWGQGTTVTVSS |
| J439M1S2(H)R5- | 278 | EVQLVQSGAEVKKPGSSVKVSCKASGYTFSDYEIH |
| E1VH | | WVRQAPGQGLEWMGVNDPESGGTFYNQKFDGRVTL |
| | | TADESTSTAYMELSSLRSEDTAVYYCTRYDKWDSF |
| | | YGMDCWGQGTTVTVSS |
| J439M1S2(H)R5- | 279 | EVQLVQSGAEVKKPGSSVKVSCKASGYTFDDYEIH |
| E2VH | | WVRQAPGQGLEWMGVIDPESGGTLYNQKFDGRATL |
| | | TADKSTSTAYMELSSLRSEDTAVYYCTRYDKWDSF |
| | | YGMDYWGQGTTVTVSS |
| J439M1S2(H)R5- | 280 | EVQLVQSGAEVKKPGSSVKVSCKASGYTFSDYEIH |
| E3VH | | WVRQAPGQGLEWMGVNDPESGGTFYNQKFDGRVTL |
| | | TADESTSTAYMELSSLRSEDTAVYYCTRYFKWDSF |
| | | EGMDYWGQGTTVTVSS |
| J439M1S2(H)R5- | 281 | EVQLVQSGAEVKKPGSSVKVSCKASGYTFDDYEIH |
| E4VH | | WVRQAPGQGLEWIGVNDPESGGTFYNQKFDGRATL |
| | | TADKSTSTAYMELSSLRSEDTAVYYCTRYWKFDSF |
| | | YGMDLWGQGTTVTVSS |
| J439M1S2(H)R5- | 282 | EVQLVQSGAEVKKPGSPVKVSCKASGYTFTDYEIH |
| E6VH | | WVRQAPGQGLEWIGVNDPDSGGTLYNQKFDGRVTL |
| | | TADESTSTAYMELSSLRSEDTAVYYCTRYDKFWSF |
| | | NGMDYWGQGTTVTVSS |
| J439M1S2(H)R5- | 283 | EVQLVQSGAEVKKPGSSVKVSCKASGYTFDDYEIH |
| E7VH | | WVRQAPGQGLEWMGVNDPESGGTFYNQKFDGRVTL |
| | | TADESTSTAYMELSSLRSEDTAVYYCTRYDKWESF |
| | | NGMDYWGQGTTVTVSS |
| J439M1S2(H)R5- | 284 | EVQLVQSGAEVKKPGSSVKVSCKASGYTFTDYEIH |
| E9VH | | WVRQAPGQGLEWIGVNDPESGGTFYNQKFDGRVTL |
| | | TADKSTSTAYMELSSLRSEDTAVYYCTRYDKWDSF |
| | | YGMDYWGQGTTVTVSS |
| J439M1S2(H)R5- | 285 | EVQLVQSGAEVKKPGSSVKVSCKASGYTFSDYEIH |
| F11VH | | WVRQAPGQGLEWMGVNDPESGGTFYNQKFDGRVTL |
| | | TADESTSTAYMELSSLRSEDTAVYYCTRYDKWESF |
| | | NGMDYWGQGTTVTVSS |
| J439M1S2(H)R5- | 286 | EVQLVQSGAEVKKPGSSVKVSCKASGYTFDDYEIH |
| F2VH | | WVRQAPGQGLEWIGVNDPESGGTLYNQKFDGRVTI |
| | | TADKSTSTAYMELSSLRSEDTAVYYCTRYEKWDSF |
| | | NGMDYWGQGTTVTVSS |
| J439M1S2(H)R5- | 287 | EVQLVQSGAEVKKPGSSVKVSCKASGYTFTDYEIH |
| F3VH | | WVRQAPGQGLEWMGVNDPESGGTFYNQKFDGRVTL |
| | | TADESTSTAYMELSSLRSEDTAVYYCTRYDKYWSF |
| | | EGMDYWGQGTTVTVSS |
| J439M1S2(H)R5- | 288 | EVQLVQSGAEVKKPGSSVKVSCKASGYTFTDYEIH |
| F4VH | | WVRQAPGQGLEWMGVNDPESGGTFYNQKFDGRVTL |
| | | TADESTSTAYMELSSLRSEDTAVYYCTRYSKWDSF |
| | | QGMDYWGQGTTVTVSS |
| J439M1S2(H)R5- | 289 | EVQLVQSGAEVKKPGSSVKVSCKASGYTFTDYEIH |
| F6VH | | WVRQAPGQGLEWIGVNDPESGGTFYNQKFDGRATL |
| | | TADESTSTAYMELSSLRSEDTAVYYCTRYDKWESF |
| | | AGMDYWGQGTTVTVSS |
| J439M1S2(H)R5- | 290 | EVQLVQSGAEVKKPGSSVKVSCKASGYTFTDYEIH |
| F8VH | | WVRQAPGQGLEWIGVNDPESGGTFYNQKFDGRVTL |
| | | TADKSTSTAYMELSSLRSEDTAVYYCTRYDKYWSF |
| | | NGMDYWGQGTTVTVSS |
| J439M1S2(H)R5- | 291 | EVQLVQSGAEVKKPGSSVKVSCKASGYTFDDYEIH |
| F9VH | | WVRQAPGQGLEWIGVNDPESGGTFYNQKFDGRATL |
| | | TADKSTSTAYMELSSLRSEDTAVYYCTRYDKWESF |
| | | NGMDYWGQGTTVTVSS |
| J439M1S2(H)R5- | 292 | EVQLVQSGAEVKKPGSSVKVSCKASGYTFDDYEIH |
| G10VH | | WVRQAPGQGLEWMGVNDPESGGTLYNQKFDGRVTI |
| | | TADKSTSTAYMELSSLRSEDTAVYYCTRYYKYWSF |
| | | LGMDYWGQGTTVTVSS |
| J439M1S2(H)R5- | 293 | EVQLVQSGAEVKKPGSSVKVSCKASGYTFEDYEIH |
| G12VH | | WVRQAPGQGLEWIGVNDPESGGTFYNQKFDGRATL |
| | | TADKSTSTAYMELSSLRSEDTAVYYCTRYDKWDSF |
| | | YGMDYWGQGTTVTVSS |
| J439M1S2(H)R5- | 294 | EVQLVQSGAEVKKPGSSVKVSCKASGYTFTDYEIH |
| G1VH | | WVRQAPGQGLEWMGVNDPESGGTLYNQKFDGRVTI |
| | | TADESTSTAYMELSSLRSEDTAVYYCTRYDKWDSF |
| | | YGMDYWGQGTTVTVSS |
| J439M1S2(H)R5- | 295 | EVQLVQSGAEVKKPGSSVKVSCKASGYTFSDYEIH |
| G2VH | | WVRQAPGQGLEWMGVNDPESGGTFYNQKFDGRVTL |
| | | TADESTSTAYMELSSLRSEDTAVYYCTRYDKWESF |
| | | AGMDYWGQGTTVTVSS |
| J439M1S2(H)R5- | 296 | EVQLVQSGAEVKKPGSSVKVSCKASGYTFSDYEIH |
| G3VH | | WVRQAPGQGLEWMGVNDPESGGTFYNQKFDGRVTL |
| | | TADESTSTAYMELSSLRSEDTAVYYCTRYSKWDSF |
| | | QGMDYWGQGTTVTVSS |
| J439M1S2(H)R5- | 297 | EVQLVQSGAEVKKPGSSVKVSCKASGYTFTDYEIH |
| G4VH | | WVRQAPGQGLEWMGVNDPESGGTFYNQKFDGRVTL |
| | | TADESTSTAYMELSSLRSEDTAVYYCTRYDKWDSF |
| | | YGMDYWGQGTTVTVSS |
| J439M1S2(H)R5- | 298 | EVQLVQSGAEVKKPGSSVKVSCKASGYTFTDYEIH |
| G7VH | | WVRQAPGQGLEWIGVNDPESGGTFYNQKFDGRVTL |
| | | TADESTSTAYMELSSLRSEDTAVYYCTRYDKWESF |
| | | NGMDYWGQGTTVTVSS |
| J439M1S2(H)R5- | 299 | EVQLVQSGAEVKKPGSSVKVSCKASGYTFTDYEIH |
| G9VH | | WVRQAPGQGLEWIGVNDPESGGTFYNQKFDGRVTL |
| | | TADESTSTAYMELSSLRSEDTAVYYCTRYDKWDSF |
| | | YGMDCWGQGTTVTVSS |
| J439M1S2(H)R5- | 300 | EVQLVQSGAEVKKPGSSVKVSCKASGYTFDDYEIH |
| H11VH | | WVRQAPGQGLEWIGVNDPESGGTFYNQKFDGRATL |
| | | TADKSTSTAYMELSSLRSEDTAVYYCTRYDRWDSF |
| | | NGMDEWGQGTTVTVSS |
| J439M1S2(H)R5- | 301 | EVQLVQSGAEVKKPGSSVKVSCKASGYTFTDYEIH |
| H12VH | | WVRQAPGQGLEWMGVNDPESGGTLYNQKFDGRVTI |
| | | TADESTSTAYMELSSLRSEDTAVYYCTRYDKWYSF |
| | | EGMDIWGQGTTVTVSS |
| J439M1S2(H)R5- | 302 | EVQLVQSGAEVKKPGSSVKVSCKASGYTFTDYEIH |
| H1VH | | WVRQAPGQGLEWIGVNDPESGGTFYNQKFDGRATL |
| | | TADESTSTAYMELSSLRSEDTAVYYCTRYDKWDSF |
| | | YGMDYWGQGTTVTVSS |
| J439M1S2(H)R5- | 303 | EVQLVQSGAEVKKPGSSVKVSCKASGYTFNDYEIH |
| H2VH | | WVRQAPGQGLEWMGVIDPESGGTLYNQKFDGRATI |
| | | TADESTSTAYMELSSLRSEDTAVYYCTRYDKWYSF |
| | | EGMDIWGQGTTVTVSS |
| J439M1S2(H)R5- | 304 | EVQLVQSGAEVKKPGSSVKVSCKASGYTFTDYEIH |
| H3VH | | WVRQAPGQGLEWMGVNDPESGGTFYNQKFDGRVTL |
| | | TADESTSTAYMELSSLRSEDTAVYYCTRYSKWDSF |
| | | LGMDYWGQGTTVTVSS |
| J439M1S2(H)R5- | 305 | EVQLVQSGAEVKKPGSSVKVSCKASGYTFADYEIH |
| H4VH | | WVRQAPGQGLEWIGVNDPESGGTFYNQKFDGRATL |
| | | TADESTSTAYMELSSLRSEDTAVYYCTRYDKWDSF |
| | | YGMDCWGQGTTVTVSS |
| J439M1S2(H)R5- | 306 | EVQLVQSGAEVKKPGSSVKVSCKASGYTFTDYEIH |
| H8VH | | WVRQAPGQGLEWIGVNDPESGGTFYNQKFDGRVTL |
| | | TADKSTSTAYMELSSLRSEDTAVYYCTRYDKYWSF |
| | | YGMDYWGQGTTVTVSS |
| J439M1S2(H)R5- | 307 | EVQLVQSGAEVKKPGSSVKVSCKASGYTFTDYEIH |
| H9VH | | WVRQAPGQGLEWMGVNDPESGGTFYNQKFDGRVTL |
| | | TADESTSTAYMELSSLRSEDTAVYYCTRYDKFWSF |
| | | NGMDYWGQGTTVTVSS |
| J439M1S2-11VH | 308 | EVQLVQSGAEVKKPGSSVKVSCKASGYTFDDYEIH |
| | | WVRQAPGQGLEWIGVNDPESGGTFYNQKFDGRATL |
| | | TADKSTSTAYMELSSLRSEDTAVYYCTRYDKWESF |
| | | NGMDYWGQGTTVTVSS |
| J439M1S2-32VH | 309 | EVQLVQSGAEVKKPGSSVKVSCKASGYTFEDYEIH |
| | | WVRQAPGQGLEWMGVNDPESGGTFYNQKFDGRVTL |
| | | TADESTSTAYMELSSLRSEDTAVYYCTRYSKWDSF |
| | | DGMDYWGQGTTVTVSS |
| J439M1S2-34VH | 310 | EVQLVQSGAEVKKPRSSVKVSCKASGYTFDDYEIH |
| | | WVRQAPGQGLEWIGVNDPESGGTFYNQKFDGRATL |
| | | TADKSTSTAYMELSSLRSEDTAVYYCTRYDKWESF |
| | | NGMDYWGQGTTVTISS |
| J439M1S2-39VH | 311 | EVQLVQSGAEVKKPGSSVKVSCKASGYTFDDYEIH |
| | | WVRQAPGQGLEWIGVNDPESGGTFYNQKFDGRATL |
| | | TADKSTSTAYMELSSLRSEDTAVYYCTRYDKWESF |
| | | DGMDYWGQGTTVTVSS |
| J439M1S2-7VH | 312 | EVQLVQSGAEVKKPGSSVKVSCKASGYTFTDYEIH |
| | | WVRQAPGQGLEWMGVNDPESGGTFYNQKFDGRVTL |
| | | TADESTSTAYMELSSLRSEDTAVYYCTRYSKWDSF |
| | | DGMDYWGQGTTVTVSS |
| J439M1S2-9VH | 313 | EVQLVQSGAEVKKPGSSVKVSCKASGYTFSDYEIH |
| | | WVRQAPGQGLEWMGVNDPESGGTFYNQKFDGRVTL |
| | | TADESTSTAYMELSSLRSEDTAVYYCTRYDKWESF |
| | | SGMDHWGQGTTVTVSS |
| J439M1S3R4- | 314 | EVQLVQSGAEVKKPGSSVKVSCKASGYTFTDYEIH |
| 38VH | | WVRQAPGQGLEWMGVNDPESGGTFYNQKFDGRVTL |
| | | TADESTSTAYMELSSLRSEDTAVYYCTRYSKWDSF |
| | | DGMDYWGQGTTVTVSS |
| J439M1S3R4- | 315 | EVQLVQSGAEETKPGSSVKVSCKASGYTFTDYEIH |
| 46VH | | WVRQAPGQGLEWMGVNDPESGGTFYNQKFDGRVTL |
| | | TADESTSTAYMELSSLRSEDTAVYYCTRYSKWDSF |
| | | DGMDYWGQGTTVTVSS |
| J439M1S3R4-4VH | 316 | EVQLVQSGAEVKKPGSSVKVSCKASGYTFTDYEIH |
| | | WVRQAPGQGLEWMGVNDPESGGTFYNQKFDGRVTL |
| | | TADESTSTAYMELSSLRSEDTAVYYCTRYSKWDSF |
| | | DGMDYWGQGTTVTVSS |
| J439M1S3R5- | 317 | EVQLVQSGAEVKKPGSSVKVSCKASGYTFDDYEIH |
| 15VH | | WVRQAPGQGLEWIGVNDPESGGTFYNQKFDGRATL |
| | | TADKSTSTAYMELSSLRSEDTAVYYCTRYDKWDSF |
| | | YGMDYWGQGTTVTVSS |

[0340] Table 9 provides a list of amino acid sequences of VL regions of affinity matured fully human IL-17 antibodies derived from h10F7 Amino acid residues of individual CDRs of each VH sequence are indicated in bold.

TABLE 9
List of amino acid sequences of affinity
matured h10F7 VL variants

| Clone | SEQ ID NO: | VL |
|---|---|---|
| J417M2S2-37Vk | 318 | DIQMTQSPSSLSASVGDRVTITCSASSSISYIYWFQ |
| | | QKPGKSPKLWIYATFELASGVPSRFSGSGSGTDYTL |
| | | TISSLQPEDFATYYCHQRSSYPWTFGQGTKLEIK |
| J417M2S2-46Vk | 319 | DIQMTQSPSSLSASVGDRVTITCSASSSISYIYWFQ |
| | | QKPGKSPKRWIYATFELASGVPSRFSGSGSGTDYTL |
| | | TISSLQPEDFATYYCQQRSSYPWTFGQGTKLEIK |
| J417M2S2-72Vk | 320 | DIQMTQSPSSLSASVGDRVTITCSASSSISYIYWFQ |
| | | QKPGKSPKRWIYATFELASGVPSRFSGSGSGTDYTL |
| | | TISSLQPEDFATYYCNQRSSYPWTFGQGTKLEIK |
| J417M2S2-96Vk | 321 | DIQMTQSPSSLSASVGDRVTITCSASSSISYIYWFQ |
| | | QKPGKSPKRWIYATFELASGVPSRFSGSGSGTDYTL |
| | | TISSLQPEDFATYYCHQRSSYPWTFGQGTKLEIK |
| J417M2S3-12Vk | 322 | DIQMTQSPSSLSASVGDRVTITCSASSSISYIYWFQ |
| | | QKPGKAPKRLIYATSELASGVPSRFSGSGSGTDYTL |
| | | TISSLQPEDFATYYCHQRSSYPFTFGQGTKLEIK |
| J417M2S3-3Vk | 323 | DIQMTQSPSSLSASVGDRVTITCSASSSVRYIYWFQ |
| | | QKPGKSPKRLIYATSDLASGVPSRFSGSGSGTDFTL |
| | | TISSLQPEDFATYYCHQRSSYPFTFGQGTKLEIK |
| J417M2S3-83Vk | 324 | DIQMTQSPSSLSASVGDRVTITCSASSSISYIYWFQ |
| | | QKPGKSPKRWIYATSELASGVPSRFSGSGSGTDYTL |
| | | TISSLQPEDFATYYCHQRSSYPWTFGQGTKLEIK |
| J417M2S3-86Vk | 325 | DIQMTQSPSSLSASVGDRVTITCSASSSISYIYWFQ |
| | | QKPGKAPKRLIYATSELASGVPSRFSGSGSGTDYTL |
| | | TISSLQPEDFATYYCHQRSSYPWTFGQGTKLEIK |
| J420M2S2-32Vk | 326 | DIQMTQSPSSLSASVGDRVTITCSASSSISYIYWFQ |
| | | QKPGKSPKRWIYATFELASGVPSRFSGSGSGTDYTL |
| | | TISSLQPEDFATYYCHQRSSYPWTFGQGTKLEIK |
| J420M2S2-91Vk | 327 | DIQMTQSPSSLSASVGDRVTITCSASSSISYIYWFQ |
| | | QKPGKSPKRWIYATFELASGVPSRFSGSGSGTDYTL |
| | | TISSLQPEDFATYYCHQRSSYPWTFGQGTKLEIK |
| J420M2S3-32Vk | 328 | DIQMTQSPSSLSASVGDRVTITCSASSSISYIYWFQ |
| | | QKPGKSPKRWIYATFELASGVPSRFSGSGSGTDYTL |
| | | TISSLQPEDFATYYCHQRSSYPWTFGQGIKLEIK |
| J425M2S2-13Vk | 329 | DIQMTQSPSSLSASVGDRVTITCSASQSVSYIYWFQ |
| | | QKPGKAPKRLIYATSELASGVPSRFSGSGSGTDYTL |
| | | TISSLQPEDFATYYCHQRSYYPLTFGQGTKLEIK |
| J425M2S2-15Vk | 330 | DIQMTQSPSSLSASVGDRVTITCSASSIINYIYWFQ |
| | | QKPGKAPKRLIYATSELASGVPSRFSGSGSGTDYTL |
| | | TISSLQPEDFATYYCHQRSSYPPTFGQGTKLEIK |
| J425M2S2-17Vk | 331 | DIQMTQSPSSLSASVGDRVTITCSASQSISPIYWFQ |
| | | QKPGKAPKRLIYTTSELASGVPSRFSGSGSGTDYTL |
| | | TISSLQPEDFATYYCQQRSSYPITFGQGTKLEIK |
| J425M2S2-18Vk | 332 | DIQMTQSPSSLSASVGDRVTITCRASQSISYLYWFQ |
| | | QKPGKSPKRLIYATSELASGVPSRFSGSGSGTDYTL |
| | | TISSLQPEDFATYYCQQRSSYPLTFGQGTKLEIK |
| J425M2S2-19Vk | 333 | DIQMTQSPSSLSASVGDRVTITCSASSIISYIYWFQ |
| | | QKPGKAPKRLIYTTFELASGVPSRFSGSGSGTDYTL |
| | | TISSLQPEDFATYYCNQRSSYPYTFGQGTKLEIK |
| J425M2S2-1Vk | 334 | DIQMTQSPSSLSASVGDRVTITCRASQSISYLYWFQ |
| | | QKPGKAPKRLIYATSELASGVPSRFSGSGSGTDFTL |
| | | TISSLQPEDFATYYCQQRRIYPPTFGQGTKLEIK |
| J425M2S2-20Vk | 335 | DIQMTQSPSSLSASVGDRVTITCSASSSIRYIYWFQ |
| | | QKPGKAPKRLIYATFELASGVPSRFSGSGSGTDFTL |
| | | TISSLQPEDFATYYCQQRSSYPLTFGQGTKLEIK |
| J425M2S2-22Vk | 336 | DIQMTQSPSSLSASVGDRVTITCRASQSISYLYWFQ |
| | | QKPGKSPKRWIYATSELASGVPSRFSGSGSGTDFTL |
| | | TISSLQPEDFATYYCQQRSNYPLTFGQGTKLEIK |
| J425M2S2-23Vk | 337 | DIQMTQSPSSLSASVGDRVTITCSASQSISYIYWFQ |
| | | QKPGKSPKRLIYATSELASGVPSRFSGSGSGTDYTL |
| | | TISSLQPEDFATYYCQQRSSYPYTFGQGTKLEIK |
| J425M2S2-24Vk | 338 | DIQMTQSPSSLSASVGDRVTITCRASSSISYLYWFQ |
| | | QKPGKAPKRWIYGTFELASGVPSRFSGSGSGTDYTL |
| | | TISSLQPEDFATYYCQQRSSYPYTFGQGTKLEIK |
| J425M2S2-27Vk | 339 | DIQMTQSPSSLSASVGDRVTITCRASSSISYLYWFQ |
| | | QKPGKSPKRWIYATSELASGVPSRFSGSGSGTDFTL |
| | | TISSLQPEDFATYYCQQRSSYPLTFGQGTKLEIK |
| J425M2S2-28Vk | 340 | DIQMTQSPSSLSASVGDRVTITCSASQSLTYIYWFQ |
| | | QKPGKAPKRLIYATSELASGVPSRFSGSGSGTDFTL |
| | | TISSLQPEDFATYYCQQRSSYPPTFGQGTKLEIK |
| J425M2S2-2Vk | 341 | DIQMTQSPSSLSASVGDRVTITCSASQSISYLYWFQ |
| | | QKPGKAPKRLIYATSELASGVPSRFSGSGSGTDFTL |
| | | TISSLQPEDFATYYCQQRSSYPLTFGQGTKLEIK |
| J425M2S2-31Vk | 342 | DIQMTQSPSSLSASVGDRVTITCSASSSIRYIYWFQ |
| | | QKPGKAPKRLIYETSDLQSGVPSRFSGSGSGTDFTL |
| | | TISSLQPEDFATYYCQQRSYYPLTFGQGTKLEIK |
| J425M2S2-32Vk | 343 | DIQMTQSPSSLSASVGDRVTITCSASSSISYIYWFQ |
| | | QKPGKSPKRLIYSTFELQSGVPSRFSGSGSGTDFTL |
| | | TISSLQPEDFATYYCQQRSFYPLTFGQGTKLEIK |
| J425M2S2-33Vk | 344 | DIQMTQSPSSLSASVGDRVTITCSASSIISYIYWFQ |
| | | QKPGKSPKRLIYATSELASGVPSRFSGSGSGTDYTL |
| | | TISSLQPEDFATYYCHQRSWYPLTFGQGTKLEIK |
| J425M2S2-36Vk | 345 | DIQMTQSPSSLSASVGDRVTITCSASSSIRYIYWFQ |
| | | QKPGKAPKRLIYATSELASGVPSRFSGSGSGTDFTL |
| | | TISSLQPEDFATYYCQQRSSYPLTFGQGTKLEIK |
| J425M2S2-37Vk | 346 | DIQMTQSPSSLSASVGDRVTITCSASQSIRYLYWFQ |
| | | QKPGKSPKRLIYATSELASGVPSRFSGSGSGTDFTL |
| | | TISSLQPEDFATYYCHQRTRYPFTFGQGTKLEIK |
| J425M2S2-38Vk | 347 | DIQMTQSPSSLSASVGDRVTITCRASSSISYLYWFQ |
| | | QKPGKSPKRLIYSTSGLASGVPSRFSGSGSGTDYTL |
| | | TISSLQPEDFATYYCNQRSYYPITFGQGTKLEIK |
| J425M2S2-39Vk | 348 | DIQMTQSPSSLSASVGDRVTITCRASSIISYIYWFQ |
| | | QKPGKAPKRWIYATSELASGVPSRFSGSGSGTDYTL |
| | | TISSLQPEDFATYYCQQRSTYPLTFGQGTKLEIK |
| J425M2S2-3Vk | 349 | DIQMTQSPSSLSASVGDRVTITCSASSSVSYIYWFQ |
| | | QKPGKAPKRWIYATSELASGVPSRFSGSGSGTDFTL |
| | | TISSLQPEDFATYYCQQRSSYPLTFGQGTKLEIK |
| J425M2S2-40Vk | 350 | DIQMTQSPSSLSASVGDRVTITCSASSIISYIYWFQ |
| | | QKPGKAPKRLIYATSELASGVPSRFSGSGSGTDYTL |
| | | TISSLQPEDFATYYCHQRSSYPYTFGQGTKLEIK |
| J425M2S2-41Vk | 351 | DIQMTQSPSSLSASVGDRVTITCSASSIMNYIYWFQ |
| | | QKPGKAPKRWIYATSELASGVPSRFSGSGSGTDFTL |
| | | TISSLQPEDFATYYCVQWSLYPPTFGQGTKLEIK |
| J425M2S2-43Vk | 352 | DIQMTQSPSSLSASVGDRVTITCSASQSIGYLYWFQ |
| | | QKPGKAPKRLIYATSELASGVPSRFSGSGSGTDFTL |
| | | TISSLQPEDFATYYCQQRSSYPLTFGQGTKLEIK |
| J425M2S2-44Vk | 353 | DIQMTQSPSSLSASVGDRVTITCRASSIISYIYWFQ |
| | | QKPGKAPKRWIYATFELASGVPSRFSGSGSGTDYTL |
| | | TISSLQPEDFATYYCHQRSSYPCTFGQGTKLEIK |
| J425M2S2-45Vk | 354 | DIQMTQSPSSLSASVGDRVTITCRASSSISYLYWFQ |
| | | QKPGKAPKRLIYATSELASGVPSRFSGSGSGTDFTL |
| | | TISSLQPEDFATYYCHQRSRYPFTFGQGTKLEIK |
| J425M2S2-46Vk | 355 | DIQMTQSPSSLSASVGDRVTITCSASSSISYLYWFQ |
| | | QKPGKSPKRWIYATSELASGVPSRFSGSGSGTDFTL |
| | | TISSLQPEDFATYYCHQRSSYPWTFGQGTKLEIK |
| J425M2S2-47Vk | 356 | DIQMTQSPSSLSASVGDRVTITCSASSSIRYIYWFQ |
| | | QKPGKAPKRWIYATSELASGVPSRFSGSGSGTDFTL |
| | | TISSLQPEDFATYYCQQRSSYPYTFGQGTKLEIK |
| J425M2S2-48Vk | 357 | DIQMTQSPSSLSASVGDRVTITCRASSSISYIYWFQ |
| | | QKPGKSPKRWIYATSELASGVPSRFSGSGSGTDYTL |
| | | TISSLQPEDFATYYCQQRSSYPITFGQGTKLEIK |
| J425M2S2-4Vk | 358 | DIQMTQSPSSLSASVGDRVTITCRASQSISYLYWFQ |
| | | QKPGKSPKRLIYATSELASGVPSRFSGSGSGTDFTL |
| | | TISSLQPEDFATYYCHQRSSYPYTFGQGTKLEIK |
| J425M2S2-51Vk | 359 | DIQMTQSPSSLSASVGDRVTITCSASSSISYLYWFQ |
| | | QKPGKAPKRLIYATSELASGVPSRFSGSGSGTDYTL |
| | | TISSLQPEDFATYYCNQRSSYPYTFGQGTKLEIK |
| J425M2S2-52Vk | 360 | DIQMTQSPSSLSASVGDRVTITCSASQSISYIYWFQ |
| | | QKPGKAPKRWIYATSELASGVPSRFSGSGSGTDFTL |
| | | TISSLQPEDFATYYCNQRSSYPYTFGQGTKLEIK |
| J425M2S2-53Vk | 361 | DIQMTQSPSSLSASVGDRVTITCSASQIIGYIYWFQ |
| | | QKPGKAPKRWIYATSELASGVPSRFSGSGSGTDYTL |
| | | TISSLQPEDFATYYCQQRSSYPLTFGQGTKLEIK |
| J425M2S2-55Vk | 362 | DIQMTQSPSSLSASVGDRVTITCSASQSINYIDWFQ |
| | | QKPGKAPKRWIYATFELASGVPSRFSGSGSGTDYTL |
| | | TISSLQPEDFATYYCLQRNNYPPTFGQGTKLEIK |
| J425M2S2-56Vk | 363 | DIQMTQSPSSLSASVGDRVTITCSASSSISYIYWFQ |
| | | QKPGKSPKRLIYSTSELQSGVPSRFSGSGSGTDFTL |
| | | TISSLQPEDFATYYCQQRTSYPITFGQGTKLEIK |
| J425M2S2-58Vk | 364 | DIQMTQSPSSLSASVGDRVTITCRASSSISYLYWFQ |
| | | QKPGKSPKRLIYATSELQSGVPSRFSGSGSGTDYTL |
| | | TISSLQPEDFATYYCQQRSSYPITFGQGTKLEIK |
| J425M2S2-59Vk | 365 | DIQMTQSPSSLSASVGDRVTITCSASSSISYLYWFQ |
| | | QKPGKSPKRLIYATSELASGVPSRFSGSGSGTDFTL |
| | | TISSLQPEDFATYYCQQRSLYPITFGQGTKLEIK |
| J425M2S2-5Vk | 366 | DIQMTQSPSSLSASVGDRVTITCSASQSVRYIYWFQ |
| | | QKPGKAPKRWIYETSELASGVPSRFSGSGSGTDFTL |
| | | TISSLQPEDFATYYCQQRSSYPLTFGQGTKLEIK |
| J425M2S2-60Vk | 367 | DIQMTQSPSSLSASVGDRVTITCRASSSISYLYWFQ |
| | | QKPGKSPKRLIYTTFDLASGVPSRFSGSGSGTDFTL |
| | | TISSLQPEDFATYYCQQRSSYPWTFGQGTKLEIK |
| J425M2S2-61Vk | 368 | DIQMTQSPSSLSASVGDRVTITCSASQSISYIYWFQ |
| | | QKPGKAPKRLIYSTSELQSGVPSRFSGSGSGTDFTL |
| | | TISSLQPEDFATYYCQQRSSYPITFGQGTKLEIK |
| J425M2S2-62Vk | 369 | DIQMTQSPSSLSASVGDRVTITCSASSSISYIYWFQ |
| | | QKPGKAPKRWIYATSELASGVPSRFSGSGSGTDYTL |
| | | TISSLQPEDFATYYCQQRSSYPLTFGQGTKLEIK |
| J425M2S2-64Vk | 370 | DIQMTQSPSSLSASVGDRVTITCSASSSISYLYWFQ |
| | | QKPGKSPKRLIYATFELASGVPSRFSGSGSGTDFTL |
| | | TISSLQPEDFATYYCQQRSSYPLTFGQGTKLEIK |
| J425M2S2-65Vk | 371 | DIQMTQSPSSLSASVGDRVTITCSASQIMSYIYWFQ |
| | | QKPGKAPKRWIYATSELASGVPSRFSGSGSGTDYTL |
| | | TISSLQPEDFATYYCQQRSSYPITFGQGTKLEIK |
| J425M2S2-67Vk | 372 | DIQMTQSPSSLSASVGDRVTITCSASQIINDLFWFQ |
| | | QKPGKAPKRLIYDTFDLQSGVPSRFSGSGSGTDFTL |
| | | TISSLQPEDFATYYCQQRTHYPITFGQGTKLEIK |
| J425M2S2-6Vk | 373 | DIQMTQSPSSLSASVGDRVTITCRASQSISYIYWFQ |
| | | QKPGKAPKRWIYATFELASGVPSRFSGSGSGTDYTL |
| | | TISSLQPEDFATYYCQQRSSYPLTFGQGTKLEIK |
| J425M2S2-71Vk | 374 | DIQMTQSPSSLSASVGDRVTITCSASQSISYIYWFQ |
| | | QKPGKAPKRLIYGTFDLASGVPSRFSGSGSGTDYTL |
| | | TISSLQPEDFATYYCQQRSSYPITFGQGTKLEIK |
| J425M2S2-72Vk | 375 | DIQMTQSPSSLSASVGDRVTITCSASSSISYLYWFQ |
| | | QKPGKAPKRWIYATSELASGVPSRFSGSGSGTDFTL |
| | | TISSLQPEDFATYYCAQRSGYPYTFGQGTKLEIK |
| J425M2S2-73Vk | 376 | DIQMTQSPSSLSASVGDRVTITCRASQSIRYIYWFQ |
| | | QKPGKSPKRWIYATSELASGVPSRFSGSGSGTDYTL |
| | | TISSLQPEDFATYYCQQRSSYPYTFGQGTKLEIK |
| J425M2S2-75Vk | 377 | DIQMTQSPSSLSASVGDRVTITCRASQSLSYIYWFQ |
| | | QKPGKAPKRWIYATSELASGVPSRFSGSGSGTDYTL |
| | | TISSLQPEDFATYYCHQRNFYPLTFGQGTKLEIK |
| J425M2S2-76Vk | 378 | DIQMTQSPSSLSASVGDRVTITCSASQIISYIYWFQ |
| | | QKPGKAPKRLIYGTSQLASGVPSRFSGSGSGTDFTL |
| | | TISSLQPEDFATYYCQQRSRYPLTFGQGTKLEIK |
| J425M2S2-77Vk | 379 | DIQMTQSPSSLSASVGDRVTITCSASQSISYIYWFQ |
| | | QKPGKAPKRLIYATSDLQSGVPSRFSGSRSGTDFTL |
| | | TISSLQPEDFATYYCQQRSSYPLTFGQGTKLEIK |
| J425M2S2-78Vk | 380 | DIQMTQSPSSLSASVGDRVTITCRASQSISYIYWFQ |
| | | QKPGKAPKRLIYATSELASGVPSRFSGSGSGTDFTL |
| | | TISSLQPEDFATYYCQQRSLYPLTFGQGTKLEIK |
| J425M2S2-82Vk | 381 | DIQMTQSPSSLSASVGDRVTITCRASQSLSYIYWFQ |
| | | QKPGKSPKRWIYATSELASGVPSRFSGSGSGTDYTL |
| | | TISSLQPEDFATYYCHQRSWYPLTFGQGTKLEIK |
| J425M2S2-83Vk | 382 | DIQMTQSPSSLSASVGDRVTITCRASSSINYLYWFQ |
| | | QKPGKSPKRLIYATFELASGVPSRFSGSGSGTDYTL |
| | | TISSLQPEDFATYYCNQRSNYPYTFGQGTKLEIK |
| J425M2S2-84Vk | 383 | DIQMTQSPSSLSASVGDRVTITCRASSIINYIYWFQ |
| | | QKPGKAPKRWIYATSELASGVPSRFSGSGSGTDYTL |
| | | TISSLQPEDFATYYCQQRSIYPLTFGQGTKLEIK |
| J425M2S2-85Vk | 384 | DIQMTQSPSSLSASVGDRVTITCRASSSISYIYWFQ |
| | | QKPGKAPKRWIYATSELASGVPSRFSGSGSGTDFTL |
| | | TISSLQPEDFATYYCQQRSIYPITFGQGTKLEIK |
| J425M2S2-86Vk | 385 | DIQMTQSPSSLSASVGDRVTITCSASSSISYIYWFQ |
| | | QKPGKSPKRWIYATSLLASGVPSRFSGSGSGTDFTL |
| | | TISSLQPEDFATYYCLQRSRYPPTFGQGTKLEIK |
| J425M2S2-87Vk | 386 | DIQMTQSPSSLSASVGDRVTITCRASSIISYIDWYQ |
| | | QKPGKAPKRWIYATFELASGVPSRFSGSGSGTDYTL |
| | | TISSLQPEDFATYYCLQRSIYPPTFGQGTKLEIK |
| J425M2S2-89Vk | 387 | DIQMTQSPSSLSASVGDRVTITCRASSSISYLYWFQ |
| | | QKPGKAPKRLIYATSELASGVPSRFSGSGSGTDFTL |
| | | TISSLQPEDFATYYCQQRSIYPLTFGQGTKLEIK |
| J425M2S2-8Vk | 388 | DIQMTQSPSSLSASVGDRVTITCSASSSLSYIYWFQ |
| | | QKPGKAPKRWIYATSELASGVPSRFSGSGSGTDYTL |
| | | TISSLQPEDFATYYCQQRSNYPITFGQGTKLEIK |
| J425M2S2-93Vk | 389 | DIQMTQSPSSLSASVGDRVTITCRASSILSYIYWFQ |
| | | QKPGKAPKRLIYATSELASGVPSRFSGSGSGTDFTL |
| | | TISSLQPEDFATYYCQQRSSYPWTFGQGTKLEIK |
| J425M2S2-96Vk | 390 | DIQMTQSPSSLSASVGDRVTITCSASSSISYIYWFQ |
| | | QKPGKSPKRLIYATSELASGVPSRFSGSGSGTDYTL |
| | | TISSLQPEDFATYYCQQRSSYPLTFGQGTKLEIK |
| J425M2S2-9Vk | 391 | DIQMTQSPSSLSASVGDRVTITCSASSSISYLYWFQ |
| | | QKPGKAPKRLIYATSELASGVPSRFSGSGSGTDYTL |
| | | TISSLQPEDFATYYCQQRSIYPLTFGQGTKLEIK |
| J425M2S3-10Vk | 392 | DIQMTQSPSSLSASVGDRVTITCSASSSISYIYWFQ |
| | | QKPGKSPKRWIYATSELASGVPSRFSGSGSGTDFTL |
| | | TISSLQPEDFATYYCQQRSNYPPTFGQGTKLEIK |
| J425M2S3-11Vk | 393 | DIQMTQSPSSLSASVGDRVTITCSASQIISYLYWFQ |
| | | QKPGKAPKRLIYATSELASGVPSRFSGSGSGTDYTL |
| | | TISSLQPEDFATYYCQQRSTYPLTFGQGTKLEIK |
| J425M2S3-12Vk | 394 | DIQMTQSPSSLSASVGDRVTITCRASSSISYIYWFQ |
| | | QKPGKSPKRLIYATFELASGVPSRFSGSGSGTDFTL |
| | | TISSLQPEDFATYYCQQRSSYPITFGQGTKLEIK |
| J425M2S3-13Vk | 395 | DIQMTQSPSSLSASVGDRVTITCSASQSVSYIYWFQ |
| | | QKPGKAPKRWIYDTSELASGVPSRFSGSGSGTDFTL |
| | | TISSLQPEDFATYYCLQQSIYPPTFGQGTKLEIK |
| J425M2S3-14Vk | 396 | DIQMTQSPSSLSASVGDRVTITCRASSSISYIYWFQ |
| | | QKPGKAPKRLIYATFELASGVPSRFSGSGSGTDYTL |
| | | TISSLQPEDFATYYCHQRSFYPYTFGQGTKLEIK |
| J425M2S3-15Vk | 397 | DIQMTQSPSSLSASVGDRVTITCSASSSISYISWFQ |
| | | QKPGKSPKRWIYATSELASGVPSRFSGSGSGTDYTL |
| | | TISSLQPEDFATYYCLQTAIYPPTFGQGTKLEIK |
| J425M2S3-16Vk | 398 | DIQMTQSPSSLSASVGDRVTITCSASSSISYIYWFQ |
| | | QKPGKAPKRLIYATSELASGVPSRFSGSGSGTDFTL |
| | | TISSLQPEDFATYYCNQRSSYPFTFGQGTKLEIK |
| J425M2S3-17Vk | 399 | DIQMTQSPSSLSASVGDRVTITCRASQSVNYIYWFQ |
| | | QKPGKAPKRWIYATSELQSGVPSRFSGSGSGTDFTL |
| | | TISSLQPEDFATYYCQQRSFYPLTFGQGTKLEIK |
| J425M2S3-1Vk | 400 | DIQMTQSPSSLSASVGDRVTITCSASSSISYIYWFQ |
| | | QKPGKAPKRLIYATSELASGVPSRFSGSGSGTDYTL |
| | | TISSLQPEDFATYYCHQRSSYPYTFGQGTKLEIK |
| J425M2S3-21Vk | 401 | DIQMTQSPSSLSASVGDRVTITCRASSSLNYIYWFQ |
| | | QKPGKAPKRWIYATSELASGVPSRFSGSRSGTDFTL |
| | | TISSLQPEDFATYYCQQRMYYPQTFGQGTKLEIK |
| J425M2S3-23Vk | 402 | DIQMTQSPSSLSASVGDRVTITCSASQSISYIYWFQ |
| | | QKPGKAPKRLIYGTSELASGVPSRFSGSGSGTDFTL |
| | | TISSLQPEDFATYYCQQRNSYPLTFGQGTKLEIK |
| J425M2S3-24Vk | 403 | DIQMTQSPSSLSASVGDRVTITCSASSSISYIYWFQ |
| | | QKPGKAPKRLIYATSELASGVPSRFSGSGSGTDFTL |
| | | TISSLQPEDFATYYCQQRSSYPPTFGQGTKLEIK |
| J425M2S3-27Vk | 404 | DIQMTQSPSSLSASVGDRVTITCSASSSISYIYWFQ |
| | | QKPGKAPKRLIYATFELASGVPSRFSGSGSGTDFTL |
| | | TISSLQPEDFATYYCQQRSSYPYTFGQGTKLEIK |
| J425M2S3-29Vk | 405 | DIQMTQSPSSLSASVGDRVTITCSASQSISYIYWFQ |
| | | QKPGKSPKRWIYATSELASGVPSRFSGSGSGTDYTL |
| | | TISSLQPEDFATYYCQQRSSYPLTFGQGTKLEIK |
| J425M2S3-2Vk | 406 | DIQMTQSPSSLSASVGDRVTITCSASSIISYIYWFQ |
| | | QKPGKAPKRLIYATSELASGVPSRFSGSGSGTDFTL |
| | | TISSLQPEDFATYYCQQRSIYPLTFGQGTKLEIK |
| J425M2S3-30Vk | 407 | DIQMTQSPSSLSASVGDRVTITCRASQSISYLYWFQ |
| | | QKPGKAPKRLIYATSELASGVPSRFSGSGSGTDFTL |
| | | TISSLQPEDFATYYCQQRSSYPYTFGQGTKLEIK |
| J425M2S3-33Vk | 408 | DIQMTQSPSSLSASVGDRVTITCRASSSISYIYWFQ |
| | | QKPGKSPKRLIYATSELASGVPSRFSGSGSGTDYTL |
| | | TISSLQPEDFATYYCQQRTSYPYTFGQGTKLEIK |
| J425M2S3-34Vk | 409 | DIQMTQSPSSLSASVGDRVTITCSASSIVSYIYWFQ |
| | | QKPGKAPKRWIYATSELASGVPSRFSGSGSGTDFTL |
| | | TISSLQPEDFATYYCQQRSSYPLTFGQGTKLEIK |
| J425M2S3-37Vk | 410 | DIQMTQSPSSLSASVGDRVTITCSASSSISYIYWFQ |
| | | QKPGKSPKRLIYPTFDLQSGVPSRFSGSGSGTDFTL |
| | | TISSLQPEDFATYYCQQRSMYPITFGQGTKLEIK |
| J425M2S3-38Vk | 411 | DIQMTQSPSSLSASVGDRVTITCSASSSISYIYWFQ |
| | | QKPGKSPKRLIYATSELASGVPSRFSGSGSGTDFTL |
| | | TISSLQPEDFATYYCQQRSRYPITFGQGTKLEIK |
| J425M2S3-41Vk | 412 | DIQMTQSPSSLSASVGDRVTITCSASSIISYIYWFQ |
| | | QKPGKSPKRLIYATSELASGVPSRFSGSGSGTDYTL |
| | | TISSLQPEDFATYYCQQRSSYPYTFGQGTKLEIK |
| J425M2S3-44Vk | 413 | DIQMTQSPSSLSASVGDRVTITCSASQSIGYLYWFQ |
| | | QKPGKAPKRWIYATSELASGVPSRFSGSGSGTDYTL |
| | | TISSLQPEDFATYYCQQRSSYPLTFGQGTKLEIK |
| J425M2S3-46Vk | 414 | DIQMTQSPSSLSASVGDRVTITCRASSSISYIYWFQ |
| | | QKPGKAPKRWIYATSELASGVPSRFSGSGSGTDFTL |
| | | TISSLQPEDFATYYCQQRSNYPLTFGQGTKLEIK |
| J425M2S3-47Vk | 415 | DIQMTQSPSSLSASVGDRVTITCSASSSISYIYWFQ |
| | | QKPGKAPKRWIYATSELASGVPSRFSGSGSGTDFTL |
| | | TISSLQPEDFATYYCQQRSSYPLTFGQGTKLEIK |
| J425M2S3-48Vk | 416 | DIQMTQSPSSLSASVGDRVTITCSASSSISYIYWFQ |
| | | QKPGKSPKRLIYATFELASGVPSRFSGSGSGTDYTL |
| | | TISSLQPEDFATYYCNQRSSYPYTFGQGTKLEIK |
| J425M2S3-49Vk | 417 | DIQMTQSPSSLSASVGDRVTITCSASSSISYLYWFQ |
| | | QKPGKAPKRWIYATSELASGVPSRFSGSGSGTDYTL |
| | | TISSLQPEDFATYYCQQRSSYPYTFGQGTKLEIK |
| J425M2S3-4Vk | 418 | DIQMTQSPSSLSASVGDRVTITCSASSSIDYLYWFQ |
| | | QKPGKAPKRWIYATSQLASGVPSRFSGSGSGTDFTL |
| | | TISSLQPEDFATYYCQQRSTYPYTFGQGTKLEIK |
| J425M2S3-50Vk | 419 | DIQMTQSPSSLSASVGDRVTITCSASQSVSYIYWFQ |
| | | QKPGKAPKRLIYATFELASGVPSRFSGSGSGTDFTL |
| | | TISSLQPEDFATYYCQQRSSYPYTFGQGTKLEIK |
| J425M2S3-52Vk | 420 | DIQMTQSPSSLSASVGDRVTITCSASQSISYIYWFQ |
| | | QKPGKAPKRLIYATSELASGVPSRFSGSGSGTDYTL |
| | | TISSLQPEDFATYYCQQRSSYPLTFGQGTKLEIK |
| J425M2S3-53Vk | 421 | DIQMTQSPSSLSASVGDRVTITCSASSSIGYIYWFQ |
| | | QKPGKSPKRWIYATSELASGVPSRFSGSGSGTDFTL |
| | | TISSLQPEDFATYYCQQRSSYPITFGQGTKLEIK |
| J425M2S3-54Vk | 422 | DIQMTQSPSSLSASVGDRVTITCRASQIISYIYWFQ |
| | | QKPGKSPKRWIYATSELASGVPSRFSGSGSGTDYTL |
| | | TISSLQPEDFATYYCLQRSSYPYTFGQGTKLEIK |
| J425M2S3-55Vk | 423 | DIQMTQSPSSLSASVGDRVTITCSASSSISYLYWFQ |
| | | QKPGKSPKRLIYETSELQSGVPSRFSGSGSGTDFTL |
| | | TISSLQPEDFATYYCQQRSSYPFTFGQGTKLEIK |
| J425M2S3-57Vk | 424 | DIQMTQSPSSLSASVGDRVTITCSASQSIGYIYWFQ |
| | | QKPGKSPKRWIYATSELASGVPSRFSGSGSGTDYTL |
| | | TISSLQPEDFATYYCQQRSSYPLTFGQGTKLEIK |
| J425M2S3-58Vk | 425 | DIQMTQSPSSLSASVGDRVTITCRASQSISYIYWFQ |
| | | QKPGKSPKRLIYATSELASGVPSRFSGSGSGTDYTL |
| | | TISSLQPEDFATYYCQQRSSYPPTFGQGTKLEIK |
| J425M2S3-59Vk | 426 | DIQMTQSPSSLSASVGDRVTITCRASSSISYIYWFQ |
| | | QKPGKAPKRLIYATSDLASGVPSRFSGSGSGTDFTL |
| | | TISSLQPEDFATYYCQQRSNYPITFGQGTKLEIK |
| J425M2S3-60Vk | 427 | DIQMTQSPSSLSASVGDRVTITCSASSIISYLYWFQ |
| | | QKPGKAPKRLIYATSELASGVPSRFSGSGSGTDYTL |
| | | TISSLQPEDFATYYCQQRSIYPLTFGQGTKLEIK |
| J425M2S3-62Vk | 428 | DIQMTQSPSSLSASVGDRVTITCSASQSISYIYWFQ |
| | | QKPGKAPKRLIYATFELASGVPSRFSGSGSGTDFTL |
| | | TISSLQPEDFATYYCQQRSIYPLTFGQGTKLEIK |
| J425M2S3-63Vk | 429 | DIQMTQSPSSLSASVGDRVTITCSASSSISYLYWFQ |
| | | QKPGKAPKRLIYATSELASGVPSRFSGSGSGTDFTL |
| | | TISSLQPEDFATYYCNQRSSYPYTFGQGTKLEIK |
| J425M2S3-65Vk | 430 | DIQMTQSPSSLSASVGDRVTITCSASQSISYIYWFQ |
| | | QKPGKAPKRLIYSTFELQSGVPSRFSGSGSGTDYTL |
| | | TISSLQPEDFATYYCNQRSSYPYTFGQGTKLEIK |
| J425M2S3-66Vk | 431 | DIQMTQSPSSLSASVGDRVTITCSASSSISYIYWFQ |
| | | QKPGKAPKRLIYATSELASGVPSRFSGSGSGTDFTL |
| | | TISSLQPEDFATYYCQQRSSYPYTFGQGTKLEIK |
| J425M2S3-6Vk | 432 | DIQMTQSPSSLSASVGDRVTITCSASSSISYLYWFQ |
| | | QKPGKSPKRLIYATSELASGVPSRFSGSGSGTDFTL |
| | | TISSLQPEDFATYYCNQRSIYPYTFGQGTKLEIK |
| J425M2S3-70Vk | 433 | DIQMTQSPSSLSASVGDRVTITCSASSSINYIYWFQ |
| | | QKPGKSPKRLIYATSELASGVPSRFSGSGSGTDFTL |
| | | TISSLQPEDFATYYCQQRSMYPFTFGQGTKLEIK |
| J425M2S3-7Vk | 434 | DIQMTQSPSSLSASVGDRVTITCSASSSISYLYWFQ |
| | | QKPGKAPKRWIYATSELASGVPSRFSGSGSGTDHTL |
| | | TISSLQPEDFATYYCQQRSSYPLTFGQGTKLEIK |
| J425M2S3-9Vk | 435 | DIQMTQSPSSLSASVGDRVTITCRASQSINYLYWFQ |
| | | QKPGKAPKRWIYATSELASGVPSRFSGSGSGTDFTL |
| | | TISSLQPEDFATYYCHQRTNYPPTFGQGTKLEIK |
| J427M2S2-10Vk | 436 | DIQMTQSPSSLSASVGDRVTITCSASSGSIPYIYWF |
| | | QQKPGKAPKRLIYGTSGLQSGVPSRFSGSGSGTDFT |
| | | LTISSLQPEDFATYYCQQRTSYPITFGQGTKLEIK |
| J427M2S2-11Vk | 437 | DIQMTQSPSSLSASVGDRVTITCRASSGIRRFINWF |
| | | QQKPGKAPKRLIYATSELQSGVPSRFSGSGSGTDYT |
| | | LTISSLQPEDFATYYCQQWSSYPWTFGQGTKLEIK |
| J427M2S2-12Vk | 438 | DIQMTQSPSSLSASVGDRVTITCSASQGSISYIYWF |
| | | QQKPGKSPKRLIYETFDLQSGVPSRFSGSGSGTDFT |
| | | LTISSLQPEDFATYYCQQRAIYPITFGQGTKLEIK |
| J427M2S2-14Vk | 439 | DIQMTQSPSSLSASVGDRVTITCSASQDSINYIYWF |
| | | QQKPGKAPKRLIYSTSDLQSGVPSRFSGSGSGTDFT |
| | | LTISSLQPEDFATYYCLQLSRYPPTFGQGTKLEIK |
| J427M2S2-15Vk | 440 | DIQMTQSPSSLSASVGDRVTITCSASQGSISYIYWF |
| | | QQKPGKSPKRLIYETFELQSGVPSRFSGSGSGTDFT |
| | | LTISSLQPEDFATYYCYQKNIYPWTFGQGTKLEIK |
| J427M2S2-18Vk | 441 | DIQMTQSPSSLSASVGDRVTITCSASQGSINYIYWF |
| | | QQKPGKAPKRWIYGTSYLASGVPSRFSGSGSGTDFT |
| | | LTISSLQPEDFATYYCQQRSSYPITFGQGTKLEIK |
| J427M2S2-20Vk | 442 | DIQMTQSPSSLSASVGDRVTITCRASSSISYIYWFQ |
| | | QKPGKAPKRWIYATSELASGVPSRFSGSGSGTDFTL |
| | | TISSLQPEDFATYYCNQRSRYPPTFGQGTKLEIK |
| J427M2S2-21Vk | 443 | DIQMTQSPSSLSASVGDRVTITCRASSSIKSYLNWF |
| | | QQKPGKAPKRLIYATFELQSGVPSRFSGSGSGTDYT |
| | | LTISSLQPEDFATYYCQQWRNYPWTFGQGTKLEIK |
| J427M2S2-23Vk | 444 | DIQMTQSPSSLSASVGDRVTITCRASSDSISYISWF |
| | | QQKPGKAPKRWIYATSELQSGVPSRFSGSGSGTDFT |
| | | LTISSLQPEDFATYYCQQPGIYPGTFGQGTKLEIK |
| J427M2S2-24Vk | 445 | DIQMTQSPSSLSASVGDRVTITCSASQGIFSYLFWY |
| | | QQKPGKAPKRLIYATSELASGVPSRFSGSGSGTDYT |
| | | LTISSLQPEDFATYYCQQGSRYPDTFGQGTKLEIK |
| J427M2S2-27Vk | 446 | DIQMTQSPSSLSASVGDRVTITCSASQGINNYLNWF |
| | | QQKPGKSPKRWIYATSELQSGVPSRFSGSGSGTDYT |
| | | LTISSLQPEDFATYYCQQWGSYPWTFGQGTKLEIK |
| J427M2S2-29Vk | 447 | DIQMTQSPSSLSASVGDRVTITCSASSDIVSYIYWF |
| | | QQKPGKSPKRLIYATSGLASGVPSRFSGSGSGTDFT |
| | | LTISSLQPEDFATYYCQQRSSYPITFGQGTKLEIK |
| J427M2S2-30Vk | 448 | DIQMTQSPSSLSASVGDRVTITCSASSSISYIYWFQ |
| | | QKPGKAPKRLIYATSELASGVPSRFSGSGSGTDYTL |
| | | TISSLQPEDFATYYCHQRSYYPLTFGQGTKLEIK |
| J427M2S2-31Vk | 449 | DIQMTQSPSSLSASVGDRVTITCRASSGSIGDLDWF |
| | | QQKPGKAPKRLIYSTFWLASGVPSRFSGSGSGTDFT |
| | | LTISSLQPEDFATYYCQQRSIYPPTFGQGTKLEIK |
| J427M2S2-33Vk | 450 | DIQMTQSPSSLSASVGDRVTITCSASSGSISYIYWF |
| | | QQKPGKAPKRWIYATSELASGVPSRFSGSGSGTDFT |
| | | LTISSLQPEDFATYYCQQRSSYPLTFGQGTKLEIK |
| J427M2S2-34Vk | 451 | DIQMTQSPSSLSASVGDRVTITCSASQGIISYIDWF |
| | | QQKPGKAPKRLIYATFELASGVPSRFSGSGSGTDFT |
| | | LTISSLQPEDFATYYCHQLGSYPDTFGQGTKLEIK |
| J427M2S2-35Vk | 452 | DIQMTQSPSSLSASVGDRVTITCSASSGIISSIDWF |
| | | QQKPGKAPKRLIYATSELQSGVPSRFSGSGSGTDYT |
| | | LTISSLQPEDFATYYCQQWMSYPLTFGQGTKLEIK |
| J427M2S2-36Vk | 453 | DIQMTQSPSSLSASVGDRVTITCSASSGSINYIYWF |
| | | QQKPGKSPKRLIYSTSDLQSGVPSRFSGSGSGTDFT |
| | | LTISSLQPEDFATYYCQQRSIYPITFGQGTKLEIK |
| J427M2S2-37Vk | 454 | DIQMTQSPSSLSASVGDRVTITCSASSDISSYLNWF |
| | | QQKPGKSPKRLIYRTSELQSGVPSRFSGSGSGTDFT |
| | | LTISSLQPEDFATYYCQQWSSYPWTFGQGTKLEIK |
| J427M2S2-39Vk | 455 | DIQMTQSPSSLSASVGDRVTITCSASSGSISYIYWF |
| | | QQKPGKAPKRLIYDTFELASGVPSRFSGSGSGTDFT |
| | | LTISSLQPEDFATYYCYQKKLYPWTFGQGTKLEIK |
| J427M2S2-4Vk | 456 | DIQMTQSPSSLSASVGDRVTITCSASSGSISYIYWF |
| | | QQKPGKAPKRWIYATSELASGVPSRFSGSGSGTDFT |
| | | LTISSLQPEDFATYYCQQRSIYPLTFGQGTKLEIK |
| J427M2S2-6Vk | 457 | DIQMTQSPSSLSASVGDRVTITCSASSDISSYLNWF |
| | | QQKPGKSPKRLIYRTSELQSGVPSRFSGSGSGTDFT |
| | | LTISSLQPEDFATYYCHQLGSYPDTFGQGTKLEIK |
| J427M2S2-7Vk | 458 | DIQMTQSPSSLSASVGDRVTITCSASSDSVSYIYWF |
| | | QQKPGKAPKRLIYATSELQSGVPSRFSGSGSGTDFT |
| | | LTISSLQPEDFATYYCQQRSSYPITFGQGTKLEIK |
| J427M2S2-8Vk | 459 | DIQMTQSPSSLSASVGDRVTITCSASQGSVSNIDWF |
| | | QQKPGKAPKRLIYATFHLASGVPSRFSGSGSGTDFT |
| | | LTISSLQPEDFATYYCLQRGSYPGTFGQGTKLEIK |
| J427M2S2-9Vk | 460 | DIQMTQSPSSLSASVGDRVTITCSASSGIISYIGWF |
| | | QQKPGKAPKRLIYATSELASGVPSRFSGSGSGTDFT |
| | | LTISSLQPEDFATYYCLHQPGIYPGTFGQGTKLEIK |
| J427M2S3-17Vk | 461 | DIQMTQSPSSLSASVGDRVTITCSASQGIISYINWY |
| | | QQKPGKAPKRLIYSTSELASGVPSRFSGSGSGTDYT |
| | | LTISSLQPEDFATYYCQQQGSYPDTFGQGTKLEIK |
| J427M2S3-1Vk | 462 | DIQMTQSPSSLSASVGDRVTITCSASSGSISYLYWF |
| | | QQKPGKAPKRLIYRTSELQSGVPSRFSGSGSGTDFT |
| | | LTISSLQPEDFATYYCQQWSSYPWTFGQGTKLEIK |
| J427M2S3-20Vk | 463 | DIQMTQSPSSLSASVGDRVTITCSASSDISSYLNWF |
| | | QQKPGKAPKRLIYPTFELQSGVPSRFSSSGSGTDFT |
| | | LTISSLQPEDFATYYCLQFSIYPPTFGQGTKLEIK |
| J427M2S3-25Vk | 464 | DIQMTQSPSSLSASVGDRVTITCSASQDSIRYIYWF |
| | | QQKPGKAPKRLIYATSELASGVPSRFSGSGSGTDFT |
| | | LTISSLQPEDFATYYCYQGTIYPPTFGQGTKLEIK |
| J427M2S3-33Vk | 465 | DIQMTQSPSSLSASVGDRVTITCRASSGINGYIYWF |
| | | QQKPGKAPKRLFYSTFELQSGVPSRFSGSGSGTDFT |
| | | LTISSLQPEDFATYYCQQRSFYPLTFGQGTKLEIK |
| J427M2S3-34Vk | 466 | DIQMTQSPSSLSASVGDRVTITCSASSGIISSIDWF |
| | | QQKPGKAPKRLIYDTFELASGVPSRFSGSGSGTDFT |
| | | LTISSLQPEDFATYYCSQMSSYPHTFGQGTKLEIK |
| J427M2S3-37Vk | 467 | DIQMTQSPSSLSASVGDRVTITCSASSGSISYIYWF |
| | | QQKPGKAPKRWIYATSELASGVPSRFSGSGSGTDFT |
| | | LTISSLQPEDFATYYCQQRSSYPITFGQGTKLEIK |
| J427M2S3-38Vk | 468 | DIQMTQSPSSLSASVGDRVTITCSASSSSISYIYWF |
| | | QQKPGKAPKRLIYATSELASGVPSRFSGSGSGTDFT |
| | | LTISSLQPEDFATYYCQQRSRYPYTFGQGTKLEIK |
| J427M2S3-40Vk | 469 | DIQMTQSPSSLSASVGDRVTITCSASSSIISNLYWF |
| | | QQKPGKAPKRWIYQTFELASGVPSRFSGSESGTDFT |
| | | LTISSLQPEDFATYYCYQGSTYPPTFGQGTKLEIK |
| J427M2S3-46Vk | 470 | DIQMTQSPSSLSASVGDRVTITCSASSGSISYIYWF |
| | | QQKPGKSPKRLIYATSELASGVPSRFSGSGSGTDFT |
| | | LTISSLQPEDFATYYCQQRSIYPITFGQGTKLEIK |
| J427M2S3-48Vk | 471 | DIQMTQSPSSLSASVGDRVTITCSASSDISSYLNWF |
| | | QQKPGKSPKRLIYRTSELQSGVPSRFSGSGSGTDFT |
| | | LTISSLQPEDFATYYCHQFSSYPQTFGQGTKLEIK |
| J427M2S3-49Vk | 472 | DIQMTQSPSSLSASVGDRVTITCSASSGSISYIYWF |
| | | QQKPGKAPKRWIYATSELASGVPSRFSGSGSGTDFT |
| | | LTISSLQPEDFATYYCHQRSSYPYTFGQGTKLEIK |
| J427M2S3-50Vk | 473 | DIQMTQSPSSLSASVGDRVTITCSASSSSINYIYWF |
| | | QQKPGKAPKRWIYATSELASGVPSRFSGSGSGTDYT |
| | | LTISSLQPEDFATYYCQQRSIYPLTFGQGTKLEIK |
| J427M2S3-51Vk | 474 | DIQMTQSPSSLSASVGDRVTITCRASSGIVSYLYWF |
| | | QQKPGKAPKRWIYATSELASGVPSRFSGSGSGTDYT |
| | | LTISSLQPEDFATYYCQQRSSYPITFGQGTKLEIK |
| J427M2S3-56Vk | 475 | DIQMTQSPSSLSASVGDRVTITCSASSDSISYIYWF |
| | | QQKPGKAPKRLIYDTFELQSGVPSRFSGSGSGTDFT |
| | | LTISSLQPEDFATYYCQQRSRYPITFGQGTKLEIK |
| J427M2S3-60Vk | 476 | DIQMTQSPSSLSASVGDRVTITCSASQTSLSAIYWF |
| | | QQKPGKAPKRLIYMTSELASGVPSRFSGSGSGTDYT |
| | | LTISSLQPEDFATYYCYQSSRYPPTFGQGTKLEIK |
| J427M2S3-62Vk | 477 | DIQMTQSPSSLSASVGDRVTITCRASSGIISYLQWF |
| | | QQKPGKAPKRWIYATSELASGVPSRFSGSGSGTDFT |
| | | LTISSLQPEDFATYYCLQVSSYPPTFGQGTKLEIK |
| J427M2S3-65Vk | 478 | DIQMTQSPSSLSASVGDRVTITCSASSGIISSIDWF |
| | | QQKPGKAPKRLIYATFALQSGVPSRFSGSGSGTDFT |
| | | LTISSLQPEDFATYYCSQMSSYPHTFGQGTKLEIK |
| J427M2S3-66Vk | 479 | DIQMTQSPSSLSASVGDRVTITCRASSGSINYIYWF |
| | | QQKPGKAPKRWIYATSELASGVPSRFSGSGSGTDYT |
| | | LTISSLQPEDFATYYCQQRSSYPYTFGQGTKLEIK |
| J427M2S3-67Vk | 480 | DIQMTQSPSSLSASVGDRVTITCRASQDSISYIYWF |
| | | QQKPGKAPKRWIYATSELASGVPSRFSGSGSGTDFT |
| | | LTISSLQPEDFATYYCQQRSSYPITFGQGTKLEIK |
| J427M2S3-68Vk | 481 | DIQMTQSPSSLSASVGDRVTITCSASSDSISYIYWF |
| | | QQKPGKAPKRWIYATSELASGVPSRFSGSGSGTDFT |
| | | LTISSLQPEDFATYYCQQRSFYPLTFGQGTKLEIK |
| J427M2S3-69Vk | 482 | DIQMTQSPSSLSASVGDRVTITCRASQGIISYIYWF |
| | | QQKPGKAPKRLIYDTSELASGVPSRFSGSGSGTDFT |
| | | LTISSLQPEDFATYYCYQKSIYPWTFGQGTKLEIK |
| J427M2S3-6Vk | 483 | DIQMTQSPSSLSASVGDRVTITCSASSEIVSYIYWF |
| | | QQKPGKAPKRLIYATSELASGVPSRFSGSGSGTDYT |
| | | LTISSLQPEDFATYYCQQRSSYPPTFGQGTKLEIK |
| J427M2S3-71Vk | 484 | DIQMTQSPSSLSASVGDRVTITCSASQGSLRYIYWF |
| | | QQKPGKAPKRWIYATSELASGVPSRFSGSGSGTDFT |
| | | LTISSLQPEDFATYYCQQRSSYPLTFGQGTKLEIK |
| J427M2S3-73Vk | 485 | DIQMTQSPSSLSASVGDRVTITCRASSGSIRDLYWF |
| | | QQKPGKAPKRLIYDTFELASGVPSRFSGSGSGTDYT |
| | | LTISSLQPEDFATYYCYQKSTYPWTFGQGTKLEIK |
| J427M2S3-74Vk | 486 | DIQMTQSPSSLSASVGDRVTITCSASSGSINYLYWF |
| | | QQKPGKAPKRLIYDTFYLASGVPSRFSGSGSGTDFT |
| | | LTISSLQPEDFATYYCYQKSTYPWTFGQGTKLEIK |
| J427M2S3-75Vk | 487 | DIQMTQSPSSLSASVGDRVTITCRASQSSIRYLYWY |
| | | QQKPGKAPKRLIYATSELASGVPSRFSGSGSGTDYT |
| | | LTISSLQPEDFATYYCQQRDIYPPTFGQGTKLEIK |
| J427M2S3-78Vk | 488 | DIQMTQSPSSLSASVGDRVTITCSASQGIGSYIYWF |
| | | QQKPGKAPKRWIYATSELASGVPSRFSGSGSGTDFT |
| | | LTISSLQPEDFATYYCHQRSSYPYTFGQGTKLEIK |
| J427M2S3-80Vk | 489 | DIQMTQSPSSLSASVGDRVTITCRASSGSIRDLYWF |
| | | QQKPGKAPKRWIYQTSELASGVPSRFSGSGSGTDFT |
| | | LTISSLQPEDFATYYCQQVSSYPPTFGQGTKLEIK |
| J427M2S3-81Vk | 490 | DIQMTQSPSSLSASVGDRVTITCSASQASISYIYWF |
| | | QQKPGKAPKRLIYDTFELQSGVPSRFSGSGSGTDFT |
| | | LTISSLQPEDFATYYCQQRSSYPITFGQGTKLEIK |
| J427M2S3-84Vk | 491 | DIQMTQSPSSLSASVGDTVTITCRASQVSISYIYWF |
| | | QQKPGKAPKRWIYATSELASGVPSRFSGSGSGTDFT |
| | | LTISSLQPEDFATYYCQQRSSYPYTFGQGTKLEIK |
| J427M2S3-85Vk | 492 | DIQMTQSPSSLSASVGDRVTITCSASSDISSYLNWF |
| | | QQKPGKSPKRLIYRTSELQSGVPSRFSGSGSGTDFT |
| | | LTISSLQPEDFATYYCQQRSFYPLTFGQGTKLEIK |
| J427M2S3-87Vk | 493 | DIQMTQSPSSLSASVGDRVTITCRASSDIFSCIFWF |
| | | QQKPGKAPKRLIYETFDLASGVPSRFSGSGSGTDYT |
| | | LTISSLQPEDFATYYCLQWSSYPPTFGQGTKLEIK |
| J427M2S3-88Vk | 494 | DIQMTQSPSSLSASVGDRVTITCSASSGIGSYIYWF |
| | | QQKPGKAPKRWIYATSELASGVPSRFSGSGSGTDFT |
| | | LTISSLQPEDFATYYCHQRSSYPYTFGQGTKLEIK |
| J427M2S3-8Vk | 495 | DIQMTQSPSSLSASVGDRVTITCSASQGIKGYLNWF |
| | | QQKPGKAPKRLIYATFELQSGVPSRFSGSGSGTDYT |
| | | LTISSLQPEDFATYYCQQWSKYPWTFGQGTKLEIK |
| J427M2S3-92Vk | 496 | DIQMTQSPSSLSASVGDRVTITCSASSGSISYIDWF |
| | | QQKPGKAPKRLIYATFELASGVPSRFSGSGSGTDFT |
| | | LTISSLQPEDFATYYCHQFSSYPQTFGQGTKLEIK |
| J427M2S3-94Vk | 497 | DIQMTQSPSSLSASVGDRVTITCSASQGIGSYIYWF |
| | | QQKPGKAPKRWIYATSELASGVPSRFSGSGSGTDFT |
| | | LTISSLQPEDFATYYCYQDSRYPPTFGQGTKLEIK |
| J427M2S3-9Vk | 498 | DIQMTQSPSSLSASVGDRVTITCRASQDSIRYIYWF |
| | | QQKPGKAPKRLIYATFELASGVPSRFSGSGSGTDYT |
| | | LTISSLQPEDFATYYCNQRSNYPYTFGQGTKLEIK |
| J439M1S2(H)3- | 499 | DIQMTQSPSSLSASVGDRVTITCSASSGSLSYIYWF |
| A12Vk | | QQKPGKAPKRWIYATSELASGVPSRFSGSGSGTDYT |
| | | LTISSLQPEDFATYYCQQRSIYPYTFGQGTKLEIK |
| J439M1S2(H)3- | 500 | DIQMTQSPSSLSASVGDRVTITCSASSGSISYIDWF |
| B37Vk | | QQKPGKSPKRLIYATFELASGVPSRFSGSGSGTDYT |
| | | LTISSLQPEDFATYYCHQIGSYPGTFGQGTKLEIK |
| J439M1S2(H)3- | 501 | DIQMTQSPSSLSASVGDRVTITCRASSGIISYVDWF |
| B5Vk | | QQKPGKAPKRLIYATFELASGVPSRFSGSGSGTDFT |
| | | LTISSLQPEDFATYYCHQIGIYPRTFGQGTKLEIK |
| J439M1S2(H)3- | 502 | DIQMTQSPSSLSASVGDRVTITCKASSGIIGYIDWF |
| B7Vk | | QQKPGKAPKRLIYATFDLASGVPSRFSGSGSGTDYT |
| | | LTISSLQPEDFATYYCRQVGSYPETFGQGTKLEIK |
| J439M1S2(H)3- | 503 | DIQMTQSPSSLSASVGDRVTITCRASSGINRYIDWF |
| C20Vk | | QQKPGKAPKRLIYATFDLASGVPSRFSGSGSGTDYT |
| | | LTISSLQPEDFATYYCRQVGSYPETFGQGTKLEIK |
| J439M1S2(H)3- | 504 | DIQMTQSPSSLSASVGDRVTITCSASQGIGSYIYWF |
| C5Vk | | QQKPGKAPKRWIYATSELASGVPSRFSGSGSGTDFT |
| | | LTISSLQPEDFATYYCQQRSSYPITFGQGTKLEIK |
| J439M1S2(H)3- | 505 | DIQMTQSPSSLSASVGDRVTITCSASQGIRSYIDWF |
| D10Vk | | QQKPGKSPKRLIYATFDLASGVPSRFSGSGSGTDYT |
| | | LTISSLQPEDFATYYCRQVGNYPGTFGQGTKLEIK |
| J439M1S2(H)3- | 506 | DIQMTQSPSSLSASVGDRVTITCSASSASVRYIDWF |
| D40Vk | | QQKPGKAPKRLIYATFDLASGVPSRFSGSGSGTDYT |
| | | LTISSLQPEDFATYYCRQVGSYPETFGQGTKLEIK |
| J439M1S2(H)R4- | 507 | DIQMTQSPSSLSASVGDRVTITCRASSGIRSYIDWF |
| A3Vk | | QQKPGKSPKRLIYATFDLASGVPSRFSGSGSGTDYT |
| | | LTISSLQPEDFATYYCRQVGNYPGTFGQGTKLEIK |
| J439M1S2(H)R4- | 508 | DIQMTQSPSSLSASVGDRVTITCSASQGSNCYLDWF |
| A6Vk | | QQKPGKAPKRLIYATSELASGVPSRFSSSGSGTDYT |
| | | LTISSLQPEDFATYYCHQLSSYPNTFGQGTKLEIK |
| J439M1S2(H)R4- | 509 | DIQMTQSPSSLSASVGDRVTITCSASSDINSYIDWF |
| B11Vk | | QQKPGKAPKRLIYATFELASGVPSRFSGSGSGTDYT |
| | | LTISSLQPEDFATYYCHQLGSYPRTFGQGTKLEIK |
| J439M1S2(H)R4- | 510 | DIQMTQSPSSLSASVGDRVTITCSASQGSISYIDWF |
| D11Vk | | QQKPGKAPKRLIYATFDLASGVPSRFSGSGSGTDYT |
| | | LTISSLQPEDFATYYCRQVGSYPETFGQGTKLEIK |
| J439M1S2(H)R5- | 511 | DIQMTQSPSSLSASVGDRVTITCRASSGIISYIDWF |
| E2Vk | | QQKPGKAPKRLIYATFDLASGVPSRFSGSGSGTDYT |
| | | LTISSLQPEDFATYYCRQVGSYPETFGQGTKLEIK |
| J439M1S2(H)R5- | 512 | DIQMTQSPSSLSASVGDRVTITCSASSGSISYIDWF |
| E6Vk | | QQKPGKAPKRLIYATFELASGVPSRFSGSGSGTDYT |
| | | LTISSLQPEDFATYYCRQVGSYPETFGQGTKLEIK |
| J439M1S2(H)R5- | 513 | DIQMTQSPSSLSASVGDRVTITCSASQGIFSYIDWF |
| E9Vk | | QQKPGKAPKRLIYATFDLASGVPSRFSGSGSGTDYT |
| | | LTISSLQPEDFATYYCRQVGSYPETFGQGTKLEIK |
| J439M1S2(H)R5- | 514 | DIQMTQSPSSLSASVGDRVTITCSASSGSISYIDWF |
| F5Vk | | QQKPGKAPKRLIYATFDLASGVPSRFSSSGSGTDYT |
| | | LTISSLQPEDFATYYCHQLGSYPGTFGQGTKLEIK |
| J439M1S2(H)R5- | 515 | DIQMTQSPSSLSASVGDRVTITCRASSGIISYIDWF |
| G10Vk | | QQKPGKAPKRLIYATFDLASGVPSRFSGSGSGTDYT |
| | | LTISSLQPEDFATYYCRQVGSYPETFGQGTKLEIK |
| J439M1S2(H)R5- | 516 | DIQMTQSPSSLSASVGDRVTITCRASSGIPSYIDWF |
| H2Vk | | QQKPGKAPKRLIYATFELASGVPSRFSGSGSGTDYT |
| | | LTISSLQPEDFATYYCRQLGSYPRTFGQGTKLEIK |
| J439M1S2(H)R5- | 517 | DIQMTQSPSSLSASVGDRVTITCRASSGIISYIDWF |
| H4Vk | | QQKPGKAPKRLIYATFDLASGVPSRFSGSGSGTDYT |
| | | LTISSLQPEDFATYYCRQVGSYPETFGHGTKLEIK |
| J439M1S2-11Vk | 518 | DIQMTQSPSSLSASVGDRVTITCRASSGIISYIDWF |
| | | QQKPGKAPKRLIYATFDLASGVPSRFSGSGSGTDYT |
| | | LTISSLQPEDFATYYCRQVGSYPETFGQGTKLEIK |
| J439M1S2-20Vk | 519 | DIQMTQSPSSLSASVGDRVTITCSASQGIISYIDWF |
| | | QQKPGKAPKRLIYATFELASGVPSRFSGSGSGTDFT |
| | | LTISSLQPEDFATYYCRQVGSYPETFGQGTKLEIK |
| J439M1S2-7Vk | 520 | DIQMTQSPSSLSVSVGDRVTITCRASSGIISYIDWF |
| | | QQKPGKAPKRLIYATFDLASGVPSRFSGSGSGTDYT |
| | | LTISSLQPEDFATYYCRQVGSYPETFGQGTKLEIK |
| J439M1S3R4- | 521 | DIQMTQSPSSLSASVGDRVTITCRASSGIISYIDWF |
| 22Vk | | QQKPGKAPKRLIYATFDLASGVPSRFSGSGSGTDYT |
| | | LTISSLQPEDFATYYCRQVGSYPETFGQGAKLEIK |
| J439M1S3R4-9Vk | 522 | DIQMTQSPSSLSASVGDRVTITCRASSGIISYIDWF |
| | | QQKPGKAPKRLIYATFDLASGVPSRFSGSGSGTDYT |
| | | LTISSLQPEDFATYYCRQVGSYPETFGQGTKLEIK |
| J439M1S3R5- | 523 | DIQMTQSPSSLSASVGDRVTITCSASSGSISYIDWF |
| 10Vk | | QQKPGKAPKRLIYATFELASGVPSRFSGSGSGTDFT |
| | | LTISSLQPEDFATYYCHQLGSYPDTFGQGTKLEIK |
| J439M1S3R5- | 524 | DIQMTQSPSSLSASVGDRVTITCSASSGSISYIDWF |
| 15Vk | | QQKPGKAPKRLIYATFDLASGVPSRFSGSGSGTDYT |
| | | LTISSLQPEDFATYYCRQVGSYPETFGQGTKLEIK |
| J439M1S3R5- | 525 | DIQMTQSPSSLSASVGDRVTITCRASSGIISYIDWF |
| 37Vk | | QQKPGKAPKRLIYATFDLASGVPSRFSGSGSGTDYT |
| | | LTISSLQPEDFATYYCRQVGSYPDTFGQGTKLEIK |
| J439M1S3R5-5Vk | 526 | DIQMTQSPSSLSTSVGDRVTITCRASSGIISYIDWF |
| | | QQKPGKAPKRLIYATFDLASGVPSRFSGSGSGTDYT |
| | | LTISSLQPEDFATYYCRQVGSYPETFGQGTKLEIK |

TABLE 10
Amino acid residues observed in affinity matured anti-IL-17 antibody
h10F7
h10f7 Heavy chain variable region (SEQ ID NO: 811)

| | |
|---|---|
| h10f7VH.1 | 1234567890123456789012345678901234567890123456789012a345678901 |
| | EVQLVQSGAEVKKPGSSVKVSCKASGYTFTDYEIHWVRQAPGQGLEWIGVNDPESGGTFYNQ |
| | DE M I D SL |
| | S IY |
| | A M |
| | E |
| | N |
| | P |
| | 234567890123456789012abc345678901234567890abcd1234567890123 |
| | KFDGRATLTADKSTSTAYMELSSLRSEDTAVYYCTRYYRYESFYGMDYWGQGTTVTVSS |
| | V I DKWDGLE I |
| | I SMFW YN C |
| | W Y SD E |
| | F V L L |
| | E N S S |
| | N M Q F |
| | F A H |
| | R A |
| | F |
| | M |
| | K |
| | H |

h10f7 Light chain variable region (SEQ ID NO: 812)

| | |
|---|---|
| H10f7Vk. | 1234567890123456789012345678901234567890123456789012345678901 |
| 1a | DIQLTQSPSSLSASVGDRVTITCSASS-SISYIYWFQQKPGKSPKRWIYATFELASGVPSR |
| | M R QGIRRCLD Y A L R SD Q |
| | K SVSNSVN E A |
| | DLVGD F D Y |
| | Q NTN S S G |
| | A FPP Q G Q |
| | I GLI G T W |
| | V LDF Q L |
| | T PCA P H |
| | E K M |
| | M |
| | 234567890123456789012345678901234567890123456a |
| | FSGSGSGTDYTLTISSLQPEDFATYYCHQRSSYPWTFGQGTKLEIK |
| | R VGN E |
| | Q WTI L |
| | L LMR G |
| | N MNF F |
| | Y KRT Y |
| | S FKY P |
| | V PAL I |
| | A GDM D |
| | S W R |
| | Q K H |
| | I H Q |
| | T G N |
| | D C |

[0341] The following were converted into IgG for further characterization.

TABLE 11
Individual Anti-IL-17 VH sequences from converted clones

| | | | Sequence |
|---|---|---|---|
| Protein region | | SEQ ID NO | 123456789012345678901234567890 |
| h10f7VH. | | 527 | EVQLVQSGAEVKKPGSSVKVSCKASGY |
| 1a.g1m | | | TFTDYEIHWVRQAPGQGLEWIGVNDPE |
| VH | | | SGGTFYNQKFDGRATLTADKSTSTAYM |
| | | | ELSSLRSEDTAVYYCTRYYRYESFYGM |
| | | | DYWGQGTTVTVSS |
| h10f7VH. | CDR-H1 | Residues 31-35 | DYEIH |
| 1a.g1m | | of SEQ ID | |
| VH | | NO.: 527 | |
| h10f7VH. | CDR-H2 | Residues 50-66 | VNDPESGGTFYNQKFDG |
| 1a.g1m | | of SEQ ID | |
| VH | | NO.: 527 | |
| h10f7VH. | CDR-H3 | Residues 99-110 | YYRYESFYGMDY |
| 1a.g1m | | of SEQ | |
| VH | | ID NO.: 527 | |
| J439M1S3R5 | | 528 | EVQLVQSGAEVKKPGSSVKVSCKASGY |
| #10 | | | TFDDYEIHWVRQAPGQGLEWIGVNDPE |
| VH | | | SGGTFYNQKFDGRATLTADKSTSTAYM |
| | | | ELSSLRSEDTAVYYCTRYDKWDSFYGM |
| | | | DYWGQGTTVTVSS |
| J439M1S3R5 | CDR-H1 | Residues 31-35 | DYEIH |
| #10 | | of SEQ ID | |
| VH | | NO.: 528 | |
| J439M1S3R5 | CDR-H2 | Residues 50-66 | VNDPESGGTFYNQKFDG |
| #10 | | of SEQ ID | |
| VH | | NO.: 528 | |
| J439M1S3R5 | CDR-H3 | Residues 99-110 | YDKWDSFYGMDY |
| #10 | | of SEQ | |
| VH | | ID NO.: 528 | |
| J439M1S3R5 | | 529 | EVQLVQSGAEVKKPGSSVKVSCKASGY |
| #11 | | | TFTDYEIHWVRQAPGQGLEWMGVNDPE |
| VH | | | SGGTFYNQKFDGRVTLTADESTSTAYM |
| | | | ELSSLRSEDTAVYYCTRYSKWDSFDGM |
| | | | DYWGQGTTVTVSS |
| J439M1S3R5 | CDR-H1 | Residues 31-35 | DYEIH |
| #11 | | of SEQ ID | |
| VH | | NO.: 529 | |
| J439M1S3R5 | CDR-H2 | Residues 50-66 | VNDPESGGTFYNQKFDG |
| #11 | | of SEQ ID | |
| VH | | NO.: 529 | |
| J439M1S3R5 | CDR-H3 | Residues 99-110 | YSKWDSFDGMDY |
| #11 | | of SEQ | |
| VH | | ID NO.: 529 | |
| J439M1S2 | | 530 | EVQLVQSGAEVKKPGSSVKVSCKASGY |
| (H)3 | | | TFTDYEIHWVRQAPGQGLEWIGVNDPD |
| #A6 | | | SGGTLYNQKFDGRVTLTADESTSTAYM |
| VH | | | ELSSLRSEDTAVYYCTRYDKWYSFEGM |
| | | | DIWGQGTTVTVSS |
| 439M1S2 | CDR-H1 | Residues 31-35 | DYEIH |
| (H)3 #A6 | | of SEQ ID | |
| VH | | NO.: 530 | |
| 439M1S2 | CDR-H2 | Residues 50-66 | VNDPDSGGTLYNQKFDG |
| (H)3 #A6 | | of SEQ ID | |
| VH | | NO.: 530 | |
| 439M1S2 | CDR-H3 | Residues 99-110 | YDKWYSFEGMDI |
| (H)3 #A6 | | of SEQ | |
| VH | | ID NO.: 530 | |
| J439M1S2 | | 531 | EVQLVQSGAEVKKPGSSVKVSCKASGY |
| (H)3 | | | TFTDYEIHWVRQAPGQGLEWIGVNDPE |
| #A11 | | | SGGTFYNQKFDGRVTLSADESTSTAYM |
| VH | | | ELSSLRSEDTAVYYCTRYDKYWSFEGM |
| | | | DYWGQGTTVTVSS |
| J439M1S2 | CDR-H1 | Residues 31-35 | DYEIH |
| (H)3 | | of SEQ ID | |
| #A11 | | NO.: 531 | |
| VH | | | |
| J439M1S2 | CDR-H2 | Residues 50-66 | VNDPESGGTFYNQKFDG |
| (H)3 | | of SEQ ID | |
| #A11 | | NO.: 531 | |
| VH | | | |
| J439M1S2 | CDR-H3 | Residues 99-110 | YDKYWSFEGMDY |
| (H)3 | | of SEQ | |
| #A11 | | ID NO.: 531 | |
| VH | | | |
| J439M1S2 | | 532 | EVQLVQSGAEVKKPGSSVKVSCKASGY |
| (H)3 | | | TFSDYEIHWVRQAPGQGLEWMGVNDPE |
| #A16 | | | SGGTFYNQKFDGRVTLTADESTSTAYM |
| VH | | | ELSSLRSEDTAVYYCTRYDKWYSFEGM |
| | | | DIWGQGTTVTVSS |
| J439M1S2 | CDR-H1 | Residues 31-35 | DYEIH |
| (H)3 | | of SEQ ID | |
| #A16 | | NO.: 532 | |
| VH | | | |
| J439M1S2 | CDR-H2 | Residues 50-66 | VNDPESGGTFYNQKFDG |
| (H)3 | | of SEQ ID | |
| #A16 | | NO.: 532 | |
| VH | | | |
| J439M1S2 | CDR-H3 | Residues 99-110 | DKWYSFEGMDI |
| (H)3 | | of SEQ | |
| #A16 | | ID NO.: 532 | |
| VH | | | |
| J439M1S2 | | 533 | EVQLVQSGAEVKKPGSSVKVSCKASGY |
| (H)3 | | | TFSDYEIHWVRQAPGQGLEWMGVNDPE |
| #B13 | | | SGGTFYNQKFDGRVTLTADESTSTAYM |
| VH | | | ELSSLRSEDTAVYYCTRYDKYWSFEGM |
| | | | DYWGQGTTVTVSS |
| J439M1S2 | CDR-H1 | Residues 31-35 | DYEIH |
| (H)3 | | of SEQ ID | |
| #B13 | | NO.: 533 | |
| VH | | | |
| J439M1S2 | CDR-H2 | Residues 50-66 | VNDPESGGTFYNQKFDG |
| (H)3 | | of SEQ ID | |
| #B13 | | NO.: 533 | |
| VH | | | |
| J439M1S2 | CDR-H3 | Residues 99-110 | DKYWSFEGMDY |
| (H)3 | | of SEQ | |
| #B13 | | ID NO.: 533 | |
| VH | | | |
| J439M1S2 | | 534 | EVQLVQSGAEVKKPGSSVKVSCKASGY |
| (H)3 | | | TFTDYEIHWVRQAPGQGLEWMGVNDPE |
| #B20 | | | SGGTFYNQKFDGRVTLTADESTSTAYM |
| VH | | | ELSSLRSEDTAVYYCTRYDKWYSFEGM |
| | | | DIWGQGTTVTVSS |
| J439M1S2 | CDR-H1 | Residues 31-35 | DYEIH |
| (H)3 | | of SEQ ID | |
| #B20 | | NO.: 534 | |
| VH | | | |
| J439M1S2 | CDR-H2 | Residues 50-66 | VNDPESGGTFYNQKFDG |
| (H)3 | | of SEQ ID | |
| #B20 | | NO.: 534 | |
| VH | | | |
| J439M1S2 | CDR-H3 | Residues 99-110 | DKWYSFEGMDI |
| (H)3 | | of SEQ | |
| #B20 | | ID NO.: 534 | |
| VH | | | |

TABLE 12
Individual clones Anti-IL-17 VL sequences

| Protein | | | Sequence |
|---|---|---|---|
| region | | SEQ ID NO | 123456789012345678901234567890 |
| J439M1S3R5 | | 535 | DIQMTQSPSSLSASVGDRVTITCSASS |
| #10 | | | GSISYIDWFQQKPGKAPKRLIYATFEL |
| VL | | | ASGVPSRFSGSGSGTDFTLTISSLQPE |
| | | | DFATYYCHQLGSYPDTFGQGTKLEIK |
| J439M1S3R5 | CDR-L1 | Residues | SASSGSISYID |
| #10 | | 24-34 of | |
| VL | | SEQ ID | |
| | | NO.: 535 | |
| J439M1S3R5 | CDR-L2 | Residues | ATFELAS |
| #10 | | 50-56 of | |
| VL | | SEQ ID | |
| | | NO.: 535 | |
| J439M1S3R5 | CDR-L3 | Residues 89-97 | HQLGSYPDT |
| #10 | | of SEQ | |
| VL | | ID NO.: 535 | |
| J439M1S3R5 | | 536 | DIQMTQSPSSLSASVGDRVTITCRASS |
| #11 | | | GIISYIDWFQQKPGKAPKRLIYATFDL |
| VL | | | ASGVPSRFSGSGSGTDYTLTISSLQPE |
| | | | DFATYYCRQVGSYPETFGQGTKLEIK |
| J439M1S3R5 | CDR-L1 | Residues | RASSGIISYID |
| #11 | | 24-34 of | |
| VL | | SEQ ID | |
| | | NO.: 536 | |
| J439M1S3R5 | CDR-L2 | Residues | ATFDLAS |
| #11 | | 50-56 of | |
| VL | | SEQ ID | |
| | | NO.: 536 | |
| J439M1S3R5 | CDR-L3 | Residues 89-97 | RQVGSYPET |
| #11 | | of SEQ | |
| VL | | ID NO.: 536 | |
| J427M2S3 | | 537 | DIQMTQSPSSLSASVGDRVTITCSASS |
| #12 | | | GIISSIDWFQQKPGKAPKRLIYATFAL |
| VL | | | QSGVPSRFSGSGSGTDFTLTISSLQPE |
| | | | DFATYYCSQMSSYPHTFGQGTKLEIK |
| J427M2S3 | CDR-L1 | Residues | SASSGIISSID |
| #12 | | 24-34 of | |
| VL | | SEQ ID | |
| | | NO.: 537 | |
| J427M2S3 | CDR-L2 | Residues | ATFALQS |
| #12 | | 50-56 of | |
| VL | | SEQ ID | |
| | | NO.: 537 | |
| J427M2S3 | CDR-L3 | Residues 89-97 | SQMSSYPHT |
| #12 | | of SEQ | |
| VL | | ID NO.: 537 | |
| J427M2S3 | | 538 | DIQMTQSPSSLSASVGDRVTITCSASS |
| #27 | | | DISSYLNWFQQKPGKSPKRLIYRTSEL |
| VL | | | QSGVPSRFSGSGSGTDFTLTISSLQPE |
| | | | DFATYYCQQWSSYPWTFGQGTKLEIK |
| J427M2S3 | CDR-L1 | Residues | SASSDISSYLN |
| #27 | | 24-34 of | |
| VL | | SEQ ID | |
| | | NO.: 538 | |
| J427M2S3 | CDR-L2 | Residues | RTSELQS |
| #27 | | 50-56 of | |
| VL | | SEQ ID | |
| | | NO.: 538 | |
| J427M2S3 | CDR-L3 | Residues 89-97 | QQWSSYPWT |
| #27 | | of SEQ | |
| VL | | ID NO.: 538 | |
| J439M1S2 | | 539 | DIQMTQSPSSLSASVGDRVTITCSASQ |
| (H)3#A6 | | | GIRSYIDWFQQKPGKSPKRLIYATFDL |
| VL | | | ASGVPSRFSGSGSGTDYTLTISSLQPE |
| | | | DFATYYCRQVGNYPGTFGQGTKLEIK |
| J439M1S2 | CDR-L1 | Residues | SASQGIRSYID |
| (H)3#A6 | | 24-34 of | |
| VL | | SEQ ID | |
| | | NO.: 539 | |
| J439M1S2 | CDR-L2 | Residues | ATFDLAS |
| (H)3#A6 | | 50-56 of | |
| VL | | SEQ ID | |
| | | NO.: 539 | |
| J439M1S2 | CDR-L3 | Residues 89-97 | RQVGNYPGT |
| (H)3#A6 | | of SEQ | |
| VL | | ID NO.: 539 | |

TABLE 13
h10F7 affinity matured scFv clones converted to full length IgG

| | | | Full length |
|---|---|---|---|
| ScFv | | | IgG (protein) |
| clone name | HC plasmid | LC plasmid | name |
| J427 M2S3 #12 | pHybE- | pHybE-hCk V3 | h10F7-M12 |
| | h10F7VH.1a.g1m | J427 M2S3 #12 | |
| J427 M2S3 #27 | pHybE- | pHybE-hCk V3 | h10F7-M27 |
| | h10F7VH.1a.g1m | J427 M2S3 #27 | |
| J439M1S3R5#10 | pHybE-hCg1, z, non- | pHybE-hCk V3 | h10F7-M10 |
| | a, mut(234, 235) V2 | J439M1S3R5#10 | |
| | J439M1S3R5#10 | | |
| J439M1S3R5#11 | pHybE-hCg1, z, non- | pHybE-hCk V3 | h10F7-M11 |
| | a, mut(234, 235) V2 | J439M1S3R5#11 | |
| | J439M1S3R5#11 | | |
| J439M1S2(H)3 | pHybE-hCg1, z, non- | pHybE-hCk V3 | h10F7-A6 |
| #A6 | a, mut(234, 235) V2 | J439M1S2(H)3#A6 | |
| | J439M1S2(H)3 #A6 | | |
| J439M1S2(H)3 | pHybE-hCg1, z, non- | pHybE-hCk V3 | h10F7-A11 |
| #A11 | a, mut(234, 235) V2 | J439M1S3R5#11 | |
| | J439M1S2(H)3 #A11 | | |
| J439M1S2(H)3 | pHybE-hCg1, z, non- | pHybE-hCk V3 | h10F7-A16 |
| #A16 | a, mut(234, 235) V2 | J439M1S2(H)3#A6 | |
| | J439M1S2(H)3 #A16 | | |
| J439M1S2(H)3 | pHybE-hCg1, z, non- | pHybE-hCk V3 | h10F7-B13 |
| #B13 | a, mut(234, 235) V2 | J439M1S3R5#11 | |
| | J439M1S2(H)3 #B13 | | |
| J439M1S2(H)3 | pHybE-hCg1, z, non- | pHybE-hCk V3 | h10F7-B20 |
| #B20 | a, mut(234, 235) V2 | J439M1S3R5#11 | |
| | J439M1S2(H)3 #B20 | | |

### Functional Characterization of TNF/IL-17 DVD-Ig Proteins

### IL-17 Enzyme-Linked Immunosorbent Assay Protocol (ELISA)

[0342] The following protocol is used to characterize the binding of IL-17 antibodies to human IL-17 by enzyme-linked immunosorbent assay (ELISA). An ELISA plate was coated with 50 μl per well of goat anti mouse IgG-Fc at 2 μg/ml, overnight at 4° C. The plate was washed 3 times with PBS/Tween. 50 μl Mab diluted to 1 μg/ml in PBS/0.1% BSA was added to appropriate wells and incubated for 1 hour at room temperature (RT). The plate was washed 3 times with PBS/Tween. 50 μl of serial diluted biotin-human IL-17 was added to appropriate wells and incubated for 1 hour at RT. The plate was washed 3 times with PBS/Tween. 50 μl of streptavidin-HRP diluted 1:10,000 in PBS/0.1% BSA was added to appropriate wells and incubated for 1 hour at RT. The plate was washed 3 times with PBS/Tween. 50 μl of TMB was added to appropriate wells and the reaction allowed to proceed for 1 minute. The reaction was stopped with 50 μl/well 2N H₂SO₄ and the absorbance read at 450 nm.

TABLE 14
Determination of binding affinity of IL-17
antibodies to human IL-17 by ELISA

| Protein name | EC50 |
|---|---|
| IL17-h10F7M10 hIgG1/K mut | 0.03 nM |
| IL17-h10F7M11 hIgG1/K mut | 0.04 nM |
| IL17-h10F7M-A6 hIgG1/K mut | 0.08 nM |
| IL17-h10F7M-A11 hIgG1/K mut | 0.04 nM |
| IL17-h10F7M-A16 hIgG1/K mut | 0.07 nM |
| IL17-h10F7M-B13 hIgG1/K mut | 0.06 nM |
| IL17-h10F7M-B20 hIgG1/K mut | 0.07 nM |

### Affinity Measurement of Anti TNF/IL-17 DVD-Ig by Surface Plasmon Resonance

[0343] The binding of antibodies to purified recombinant IL-17 proteins was determined by surface plasmon resonance-based measurements with a Biacore® T200 instrument (GE Healthcare) using running HBS-EP (10 mM HEPES [pH 7.4], 150 mM NaCl, 3 mM EDTA, and 0.005% surfactant P20) containing 0.1 mg/ml BSA at 25° C. All chemicals were obtained from Biacore® AB (GE Healthcare) or otherwise from a source as described in the text. Approximately 5000 RU of goat anti-human IgG (Fcg) fragment specific polyclonal antibody (Pierce Biotechnology Inc, Rockford, Ill.) diluted in 10 mM sodium acetate (pH 4.5) was directly immobilized across a CM5 research grade biosensor chip using a standard amine coupling kit according to manufacturer's instructions and procedures at 25 μg/ml. Unreacted moieties on the biosensor surface were blocked with ethanolamine. Modified carboxymethyl dextran surface in flowcell 2, 3 and 4 were used as a reaction surface. Modified carboxymethyl dextran with Goat IgG in flow cell 1 was used as the reference surface. For kinetic analysis, rate equations derived from the 1:1 Langmuir binding model were fitted simultaneously to association and dissociation phases of all six injections (using global fit analysis with local float for Rmax) with the use of Biacore T200 Evaluation software v.1.0. Purified antibodies were diluted in HEPES-buffered saline for capture across goat anti-human IgG specific reaction surfaces. Antibodies to be captured as ligand (1-5 μg/ml) were injected over reaction matrices at a flow rate of 50 μl/minute. Association phase was monitored for 5 minute, while dissociation phase was monitored for 10-60 min to accommodate for slower off-rates. The association and dissociation rate constants, ka (unit M-1 s-1) and kd (unit s-1) were determined under a continuous flow rate of 50 μl/minute. Rate constants were derived by making kinetic binding measurements at six different antigen concentrations ranging from 0.78 nM to 100 nM, depending on the species of IL-17 tested. The association ka, dissociation rate kd and equilibrium dissociation constant KD were calculated with the use of the same Biacore T200 Evaluation software v.1.0.

TABLE 15

| | | Human IL-17AA | | | Cyno IL-17AA | | |
|---|---|---|---|---|---|---|---|
| Antibody | Moniker # | kₐ | k_{d} | K_{D} | kₐ | k_{d} | K_{D} |
| IL17-h10F7M10 | PR-1262986 | 4.45E+06 | 6.80E−06 | 1.53E−12 | 4.14E+06 | 4.40E−06 | 1.06E−12 |
| hIgG1/K mut | | | | | | | |
| IL17-h10F7M11 | PR-1263009 | 4.53E+06 | 7.24E−06 | 1.59E−12 | 4.50E+06 | 3.88E−06 | 8.60E−13 |
| hIgG1/K mut | | | | | | | |
| IL17-h10F7M-A6 | PR-1267640 | 2.99E+06 | 4.48E−06 | 1.50E−12 | | | |
| hIgG1/K mut | | | | | | | |
| IL17-h10F7M-A11 | PR-1267637 | 3.64E+06 | 7.68E−06 | 2.10E−12 | | | |
| hIgG1/K mut | | | | | | | |
| IL17-h10F7M-A16 | PR-1267643 | 2.99E+06 | 4.52E−06 | 1.51E−12 | | | |
| hIgG1/K mut | | | | | | | |
| IL17-h10F7M-B13 | PR-1267636 | 2.68E+06 | 6.88E−06 | 2.56E−12 | | | |
| hIgG1/K mut | | | | | | | |
| IL17-h10F7M-B20 | PR-1267635 | 2.92E+06 | 6.27E−06 | 2.14E−12 | | | |
| hIgG1/K mut | | | | | | | |

### Assay for IL-17A and IL-17A/F Induced IL-6 Secretion in Primary Human Foreskin Fibroblasts HS27

[0344] The human HS27 cell line (ATCC Accession # CRL-1634) secretes IL-6 in response to IL-17. The IL-17-induced IL-6 secretion is inhibited by neutralizing anti-IL-17 antibodies (See, e.g., J. Immunol., 155: 5483-5486 (1995); Cytokine, 9: 794-800 (1997)).

[0345] HS27 cells were maintained in assay medium: DMEM high glucose medium (Gibco #11965) with 10% fetal bovine serum (Gibco #26140), 4 mM L-glutamine, 1 mM sodium pyruvate, penicillin G (100 U/500 ml) and streptomycin (100 μg/500 ml). Cells were grown in T150 flasks until they were about 80-90% confluent the day of the assay. Human IL-17A (R&D Systems, #317-IL/CF), or cynomolgous monkey (cyno) IL-17A (generated at Abbott) was reconstituted in sterile PBS without Ca²⁺ and Mg²⁺ stored frozen, freshly thawed for use and diluted to 240 pM (4×) or 4 nM (4×) for IL-17A/F in assay medium. Serial dilutions of antibodies were made in a separate plate (4× concentrations), mixed with equal volume of 240 pM (4×) of huIL-17 or cynoIL-17A or 4 nM (4×) huIL-17A/F and incubated at 37° C. for 1 hour. HS27 cells (typically about 20,000 cells in 50 μl assay medium) were added to each well of a 96-well flat-bottom tissue culture plate (Costar #3599), followed by addition of 50 μl of the pre-incubated antibody plus IL-17 mix. The final concentration of human and cynoIL-17A was 60 pM. The final concentration of human IL-17A/F was 1 nM. Cells were incubated for about 24 hrs at 37° C. The media supernatants were then collected. The level of IL-17 neutralization was measured by determination of IL-6 amounts in supernatant using a commercial Meso Scale Discovery kit (cat # L411AKB-1) according to manufacturer's instruction. IC50 values were obtained using logarithm of antibody versus IL-6 amount variable slope fit.

Assay for IL-17 and TNF-α Induced IL-6 Secretion from Murine Embryonic Fibroblast Cell Line (NIH3T3)

[0346] The murine NIH3T3 cell line (ATCC Accession # CRL-1658) secretes IL-6 in response to murine, rat, or rabbit IL-17A and murine TNFα (R&D Systems, Cat #410-MT). The IL-17 induced IL-6 secretion is inhibited by neutralizing anti-IL-17 antibodies.

[0347] NIH3T3 cells were maintained in assay medium: DMEM (Invitrogen Cat #11965-092) with 10% fetal bovine serum (Gibco #26140-079), 1% Non Essential Amino Acids, 2 mM L-glutamine, 1 mM sodium pyruvate, penicillin G (100 U/500 ml), and streptomycin (100 μg/500 ml). Cells were grown in T150 flasks until they were about 80-90% confluent the day of the assay. Rat IL17A (Prospec bio, Cat # CYT-542) was reconstituted in sterile PBS, without Ca2+ and Mg2+, with 0.1% BSA, aliquoted and stored frozen at 100 μg/mL. Rabbit IL17A (Abbott, A-1239293.0) was aliquoted and stored frozen at 260 μg/mL. Murine TNF-α was reconstituted in 0.1% BSA/PBS without Ca²⁺ and Mg²⁺ at a concentration of 10 μg/mL, aliquoted, and stored frozen. Freshly thawed IL-17 antibodies were diluted to 200 μg/ml (4×) in assay medium. Serial dilutions of antibodies were made in a separate plate (4× concentrations), mixed with equal volume of 40 ng/ml (4×) murine or rat IL-17A or 100 ng/mL rabbit IL-17A, and incubated at 37° C. for 1 hr.

[0348] NIH3T3 cells (typically about 400,000 cells in 50 μl assay medium) were added to each well of a 96-well flat-bottom tissue culture plate (Costar #3599), followed by addition of 50 μl of the pre-incubated antibody plus IL-17 mix. Mu TNF-α at 5.5 ng/mL (10×) was added in 11 μl of media to each well. The final concentration of IL-17A was 10 ng/ml for murine and rat and 25 ng/mL for rabbit. The final concentration for mu TNFα was 0.55 ng/mL. Cells were incubated for about 24 hrs at 37° C. The media supernatants were then collected. The level of IL-17 neutralization was measured by determination of IL-6 amounts in supernatant using a commercial Meso Scale Discovery kit (cat # K112AKA-4) according to manufacturer's instruction. IC50 values were obtained using logarithm of antibody versus IL-6 amount variable slope fit.

TABLE 16

| | Human | Cyno | Mouse | Rat | Rabbit |
|---|---|---|---|---|---|
| Antibody | 60 pM | 60 pM | 3 nM | .3 nM | .75 nM |
| IL17-h10F7M11 | 40 | 16 | 8 | 83 | 73 |
| hIgG1/K mut | | | | | |
| IL17-h10F7M10 | 30 | 12 | 8 | 99 | 81 |
| hIgG1/K mut | | | | | |
| IL17-h10F7M-A6 | 80 | 29 | 130 | 75 | 121 |
| hIgG1/K mut | | | | | |
| IL17-h10F7M-A11 | 40 | 18 | 31 | 128 | 123 |
| hIgG1/K mut | | | | | |
| IL17-h10F7M-A16 | 70 | 11 | 23 | 102 | 117 |
| hIgG1/K mut | | | | | |
| IL17-h10F7M-B13 | 60 | 9 | 60 | 73 | 113 |
| hIgG1/K mut | | | | | |
| IL17-h10F7M-B20 | 70 | 27 | 39 | 93 | 124 |
| hIgG1/K mut | | | | | |

### Example 3

### Generation of Novel of Fully Novel Anti-TNF/IL-17 DVD-Ig Molecules

### 1.1: Construction of TNF/IL-17 DVD-Ig DNA Constructs

[0349] Anti-TNF antibody variable domains were combined with multiple IL-17 antibody variable domains by overlapping PCR amplification with intervening linker DNA sequences. The amplified PCR products are subcloned into expression vectors suitable for transient expression in HEK293 cells and the open reading frame regions are confirmed by sequencing before DVD-Ig expression.

### Expression and Production of TNF/IL17 DVD-Ig Binding Proteins

[0350] After DNA confirmation by sequencing, all DVD-Ig DNA constructs were expanded in E. coli and DNA is purified using Qiagen Hispeed Maxi Prep (CAT #12662, QIAGEN). DVD-Ig DNA was transfected into log phase 293E cells (0.5×10⁶/ml, viability>95%) by mixing PEI and DNA @ 2:1 ratio with 0.2 μg/ml heavy chain DNA and 0.3 μg/ml light chain DNA. DNA:PEI complex was formed at room temperature in TC hood for fifteen minutes before adding to 293E cells. Twenty four later, 0.5% TN1 was added to 293E cells. At day five, supernatant was collected for human IgG1 titer measurement. Cell supernatant was harvested at day seven and filtered through 0.2 μM PES filter. Supernatant was purified by using Protein A Sepharose Affinity Chromatography according to manufacturer's instruction. Purified DVD-Igs were eluted off the column by 0.1 M glycine (pH 2.99) and dialyzed into 15 mM histidine buffer (pH 6.0) immediately. The binding proteins were quantitated by A280 and analyzed by mass spectrometry and SEC.

### Sequences of TNF/IL-17 DVD-Ig Constructs

[0351] Amino acid sequence of heavy chain and light chain of DVD-Ig proteins capable of binding human TNF and hIL-17 were determined. The amino acid sequences of variable heavy chains, variable light chains, and constant regions of TNF/IL-17 DVD-Ig binding proteins are shown in the table below (Table 17). Both wildtype human IgG1 and mutant IgG1 with leu to ala mutations at lower hinge region positions 234, 235 (EU numbering system) have been tested and shown to be comparably active in binding to TNF and IL-17.

TABLE 17
Sequences of variable and constant regions of TNF/IL-17
DVD-Ig binding proteins.

| Protein region | Sequence Identifier | 12345678901234567890 |
|---|---|---|
| DVD HEAVY | SEQ ID NO.: 540 | EVQLVESGGGLVQPGGSLRL |
| VARIABLE | | SCAASGFTFSNYGVTWVRQA |
| hMAK195-21-GS10-M11 | | PGKGLEWVSMIWADGSTHYA |
| DVD | | SSVKGRFTISRDNSKNTLYL |
| | | QMNSLRAEDTAVYYCAREWQ |
| | | HGPVAYWGQGTLVTVSSGGG |
| | | GSGGGGSEVQLVQSGAEVKK |
| | | PGSSVKVSCKASGYTFTDYE |
| | | IHWVRQAPGQGLEWMGVNDP |
| | | ESGGTFYNQKFDGRVTLTAD |
| | | ESTSTAYMELSSLRSEDTAV |
| | | YYCTRYSKWDSFDGMDYWGQ |
| | | GTTVTVSS |
| hMAK195-21Vh | SEQ ID NO.: 541 | EVQLVESGGGLVQPGGSLRL |
| | | SCAASGFTFSNYGVTWVRQA |
| | | PGKGLEWVSMIWADGSTHYA |
| | | SSVKGRFTISRDNSKNTLYL |
| | | QMNSLRAEDTAVYYCAREWQ |
| | | HGPVAYWGQGTLVTVSS |
| LINKER | SEQ ID NO.: 542 | GGGGSGGGGS |
| H10F7-M11Vh | SEQ ID NO.: 543 | EVQLVQSGAEVKKPGSSVKV |
| | | SCKASGYTFTDYEIHWVRQA |
| | | PGQGLEWMGVNDPESGGTFY |
| | | NQKFDGRVTLTADESTSTAY |
| | | MELSSLRSEDTAVYYCTRYS |
| | | KWDSFDGMDYWGQGTTVTVS |
| | | S |
| CH CG1234, 235 | SEQ ID NO.: 544 | ASTKGPSVFPLAPSSKSTSG |
| MUT Z NONA | | GTAALGCLVKDYFPEPVTVS |
| | | WNSGALTSGVHTFPAVLQSS |
| | | GLYSLSSVVTVPSSSLGTQT |
| | | YICNVNHKPSNTKVDKKVEP |
| | | KSCDKTHTCPPCPAPEAAGG |
| | | PSVFLFPPKPKDTLMISRTP |
| | | EVTCVVVDVSHEDPEVKFNW |
| | | YVDGVEVHNAKTKPREEQYN |
| | | STYRVVSVLTVLHQDWLNGK |
| | | EYKCKVSNKALPAPIEKTIS |
| | | KAKGQPREPQVYTLPPSREE |
| | | MTKNQVSLTCLVKGFYPSDI |
| | | AVEWESNGQPENNYKTTPPV |
| | | LDSDGSFFLYSKLTVDKSRW |
| | | QQGNVFSCSVMHEALHNHYT |
| | | QKSLSLSPGK |
| DVD LIGHT | SEQ ID NO.: 545 | DIQMTQSPSSLSASVGDRVT |
| VARIABLE | | ITCRASQLVSSAVAWYQQKP |
| hMAK195-21-GS10- | | GKAPKLLIYWASARHTGVPS |
| M11 DVD | | RFSGSGSGTDFTLTISSLQP |
| | | EDFATYYCQQHYKTPFTFGQ |
| | | GTKLEIKRGGSGGGGSGDIQ |
| | | MTQSPSSLSASVGDRVTITC |
| | | RASSGIISYIDWFQQKPGKA |
| | | PKRLIYATFDLASGVPSRFS |
| | | GSGSGTDYTLTISSLQPEDF |
| | | ATYYCRQVGSYPETFGQGTK |
| | | LEIKR |
| hMAK195-21VL | SEQ ID NO.: 546 | DIQMTQSPSSLSASVGDRVT |
| | | ITCRASQLVSSAVAWYQQKP |
| | | GKAPKLLIYWASARHTGVPS |
| | | RFSGSGSGTDFTLTISSLQP |
| | | EDFATYYCQQHYKTPFTFGQ |
| | | GTKLEIKR |
| LINKER | SEQ ID NO.: 547 | GGSGGGGSG |
| H10F7-M11VL | SEQ ID NO.: 548 | DIQMTQSPSSLSASVGDRVT |
| | | ITCRASSGIISYIDWFQQKP |
| | | GKAPKRLIYATFDLASGVPS |
| | | RFSGSGSGTDYTLTISSLQP |
| | | EDFATYYCRQVGSYPETFGQ |
| | | GTKLEIKR |
| CL | SEQ ID NO.: 549 | TVAAPSVFIFPPSDEQLKSG |
| | | TASVVCLLNNFYPREAKVQW |
| | | KVDNALQSGNSQESVTEQDS |
| | | KDSTYSLSSTLTLSKADYEK |
| | | HKVYACEVTHQGLSSPVTKS |
| | | FNRGEC |
| DVD HEAVY | SEQ ID NO.: 550 | EVQLVESGGGLVQPGGSLRL |
| VARIABLE | | SCAASGFTFSNYGVEWVRQA |
| hMAK195-24-GS10- | | PGKGLEWVSGIWADGSTHYA |
| M11 DVD | | DTVKSRFTISRDNSKNTLYL |
| | | QMNSLRAEDTAVYYCAREWQ |
| | | HGPVAYWGQGTLVTVSSGGG |
| | | GSGGGGSEVQLVQSGAEVKK |
| | | PGSSVKVSCKASGYTFTDYE |
| | | IHWVRQAPGQGLEWMGVNDP |
| | | ESGGTFYNQKFDGRVTLTAD |
| | | ESTSTAYMELSSLRSEDTAV |
| | | YYCTRYSKWDSFDGMDYWGQ |
| | | GTTVTVSS |
| hMAK195-24Vh | SEQ ID NO.: 551 | EVQLVESGGGLVQPGGSLRL |
| | | SCAASGFTFSNYGVEWVRQA |
| | | PGKGLEWVSGIWADGSTHYA |
| | | DTVKSRFTISRDNSKNTLYL |
| | | QMNSLRAEDTAVYYCAREWQ |
| | | HGPVAYWGQGTLVTVSS |
| LINKER | SEQ ID NO.: 552 | GGGGSGGGGS |
| H10F7-M11Vh | SEQ ID NO.: 553 | EVQLVQSGAEVKKPGSSVKV |
| | | SCKASGYTFTDYEIHWVRQA |
| | | PGQGLEWMGVNDPESGGTFY |
| | | NQKFDGRVTLTADESTSTAY |
| | | MELSSLRSEDTAVYYCTRYS |
| | | KWDSFDGMDYWGQGTTVTVS |
| | | S |
| CH CG1 234, 235 | SEQ ID NO.: 554 | ASTKGPSVFPLAPSSKSTSG |
| MUT Z NONA | | GTAALGCLVKDYFPEPVTVS |
| | | WNSGALTSGVHTFPAVLQSS |
| | | GLYSLSSVVTVPSSSLGTQT |
| | | YICNVNHKPSNTKVDKKVEP |
| | | KSCDKTHTCPPCPAPEAAGG |
| | | PSVFLFPPKPKDTLMISRTP |
| | | EVTCVVVDVSHEDPEVKFNW |
| | | YVDGVEVHNAKTKPREEQYN |
| | | STYRVVSVLTVLHQDWLNGK |
| | | EYKCKVSNKALPAPIEKTIS |
| | | KAKGQPREPQVYTLPPSREE |
| | | MTKNQVSLTCLVKGFYPSDI |
| | | AVEWESNGQPENNYKTTPPV |
| | | LDSDGSFFLYSKLTVDKSRW |
| | | QQGNVFSCSVMHEALHNHYT |
| | | QKSLSLSPGK |
| DVD LIGHT | SEQ ID NO.: 555 | DIQMTQSPSSLSASVGDRVT |
| VARIABLE | | ITCKASQLVSSAVAWYQQKP |
| hMAK195-24-GS10- | | GKAPKLLIYWASTLHTGVPS |
| M11 DVD | | RFSGSGSGTDFTLTISSLQP |
| | | EDFATYYCQQHYRTPFTFGQ |
| | | GTKLEIKRGGSGGGGSGDIQ |
| | | MTQSPSSLSASVGDRVTITC |
| | | RASSGIISYIDWFQQKPGKA |
| | | PKRLIYATFDLASGVPSRFS |
| | | GSGSGTDYTLTISSLQPEDF |
| | | ATYYCRQVGSYPETFGQGTK |
| | | LEIKR |
| hMAK195-24VL | SEQ ID NO.: 556 | DIQMTQSPSSLSASVGDRVT |
| | | ITCKASQLVSSAVAWYQQKP |
| | | GKAPKLLIYWASTLHTGVPS |
| | | RFSGSGSGTDFTLTISSLQP |
| | | EDFATYYCQQHYRTPFTFGQ |
| | | GTKLEIKR |
| LINKER | SEQ ID NO.: 557 | GGSGGGGSG |
| H10F7-M11VL | SEQ ID NO.: 558 | DIQMTQSPSSLSASVGDRVT |
| | | ITCRASSGIISYIDWFQQKP |
| | | GKAPKRLIYATFDLASGVPS |
| | | RFSGSGSGTDYTLTISSLQP |
| | | EDFATYYCRQVGSYPETFGQ |
| | | GTKLEIKR |
| CL | SEQ ID NO.: 559 | TVAAPSVFIFPPSDEQLKSG |
| | | TASVVCLLNNFYPREAKVQW |
| | | KVDNALQSGNSQESVTEQDS |
| | | KDSTYSLSSTLTLSKADYEK |
| | | HKVYACEVTHQGLSSPVTKS |
| | | FNRGEC |
| DVD HEAVY | SEQ ID NO.: 560 | EVQLVESGGGLVQPGGSLRL |
| VARIABLE | | SCAASGFTFSNYGVTWVRQA |
| hMAK195-21-GS10- | | PGKGLEWVSMIWADGSTHYA |
| M10 DVD | | SSVKGRFTISRDNSKNTLYL |
| | | QMNSLRAEDTAVYYCAREWQ |
| | | HGPVAYWGQGTLVTVSSGGG |
| | | GSGGGGSEVQLVQSGAEVKK |
| | | PGSSVKVSCKASGYTFDDYE |
| | | IHWVRQAPGQGLEWIGVNDP |
| | | ESGGTFYNQKFDGRATLTAD |
| | | KSTSTAYMELSSLRSEDTAV |
| | | YYCTRYDKWDSFYGMDYWGQ |
| | | GTTVTVSS |
| hMAK195-21Vh | SEQ ID NO.: 561 | EVQLVESGGGLVQPGGSLRL |
| | | SCAASGFTFSNYGVTWVRQA |
| | | PGKGLEWVSMIWADGSTHYA |
| | | SSVKGRFTISRDNSKNTLYL |
| | | QMNSLRAEDTAVYYCAREWQ |
| | | HGPVAYWGQGTLVTVSS |
| LINKER | SEQ ID NO.: 562 | GGGGSGGGGS |
| H10F7-M10Vh | SEQ ID NO.: 563 | EVQLVQSGAEVKKPGSSVKV |
| | | SCKASGYTFDDYEIHWVRQA |
| | | PGQGLEWIGVNDPESGGTFY |
| | | NQKFDGRATLTADKSTSTAY |
| | | MELSSLRSEDTAVYYCTRYD |
| | | KWDSFYGMDYWGQGTTVTVS |
| | | S |
| CH CG1, 234, 235 | SEQ ID NO.: 564 | ASTKGPSVFPLAPSSKSTSG |
| MUT Z NONA | | GTAALGCLVKDYFPEPVTVS |
| | | WNSGALTSGVHTFPAVLQSS |
| | | GLYSLSSVVTVPSSSLGTQT |
| | | YICNVNHKPSNTKVDKKVEP |
| | | KSCDKTHTCPPCPAPEAAGG |
| | | PSVFLFPPKPKDTLMISRTP |
| | | EVTCVVVDVSHEDPEVKFNW |
| | | YVDGVEVHNAKTKPREEQYN |
| | | STYRVVSVLTVLHQDWLNGK |
| | | EYKCKVSNKALPAPIEKTIS |
| | | KAKGQPREPQVYTLPPSREE |
| | | MTKNQVSLTCLVKGFYPSDI |
| | | AVEWESNGQPENNYKTTPPV |
| | | LDSDGSFFLYSKLTVDKSRW |
| | | QQGNVFSCSVMHEALHNHYT |
| | | QKSLSLSPGK |
| DVD LIGHT | SEQ ID NO.: 565 | DIQMTQSPSSLSASVGDRVT |
| VARIABLE | | ITCRASQLVSSAVAWYQQKP |
| hMAK195-21-GS10- | | GKAPKLLIYWASARHTGVPS |
| M10 DVD | | RFSGSGSGTDFTLTISSLQP |
| | | EDFATYYCQQHYKTPFTFGQ |
| | | GTKLEIKRGGSGGGGSGDIQ |
| | | MTQSPSSLSASVGDRVTITC |
| | | SASSGSISYIDWFQQKPGKA |
| | | PKRLIYATFELASGVPSRFS |
| | | GSGSGTDFTLTISSLQPEDF |
| | | ATYYCHQLGSYPDTFGQGTK |
| | | LEIKR |
| hMAK195-21VL | SEQ ID NO.: 566 | DIQMTQSPSSLSASVGDRVT |
| | | ITCRASQLVSSAVAWYQQKP |
| | | GKAPKLLIYWASARHTGVPS |
| | | RFSGSGSGTDFTLTISSLQP |
| | | EDFATYYCQQHYKTPFTFGQ |
| | | GTKLEIKR |
| LINKER | SEQ ID NO.: 567 | GGSGGGGSG |
| H10F7-M10VL | SEQ ID NO.: 568 | DIQMTQSPSSLSASVGDRVT |
| | | ITCSASSGSISYIDWFQQKP |
| | | GKAPKRLIYATFELASGVPS |
| | | RFSGSGSGTDFTLTISSLQP |
| | | EDFATYYCHQLGSYPDTFGQ |
| | | GTKLEIKR |
| CL | SEQ ID NO.: 569 | TVAAPSVFIFPPSDEQLKSG |
| | | TASVVCLLNNFYPREAKVQW |
| | | KVDNALQSGNSQESVTEQDS |
| | | KDSTYSLSSTLTLSKADYEK |
| | | HKVYACEVTHQGLSSPVTKS |
| | | FNRGEC |
| DVD HEAVY | SEQ ID NO.: 570 | EVQLVESGGGLVQPGGSLRL |
| VARIABLE | | SCAASGFTFSNYGVEWVRQA |
| hMAK195-24-GS10- | | PGKGLEWVSGIWADGSTHYA |
| M10 DVD | | DTVKSRFTISRDNSKNTLYL |
| | | QMNSLRAEDTAVYYCAREWQ |
| | | HGPVAYWGQGTLVTVSSGGG |
| | | GSGGGGSEVQLVQSGAEVKK |
| | | PGSSVKVSCKASGYTFDDYE |
| | | IHWVRQAPGQGLEWIGVNDP |
| | | ESGGTFYNQKFDGRATLTAD |
| | | KSTSTAYMELSSLRSEDTAV |
| | | YYCTRYDKWDSFYGMDYWGQ |
| | | GTTVTVSS |
| hMAK195-24Vh | SEQ ID NO.: 571 | EVQLVESGGGLVQPGGSLRL |
| | | SCAASGFTFSNYGVEWVRQA |
| | | PGKGLEWVSGIWADGSTHYA |
| | | DTVKSRFTISRDNSKNTLYL |
| | | QMNSLRAEDTAVYYCAREWQ |
| | | HGPVAYWGQGTLVTVSS |
| LINKER | SEQ ID NO.: 572 | GGGGSGGGGS |
| H10F7-M10Vh | SEQ ID NO.: 573 | EVQLVQSGAEVKKPGSSVKV |
| | | SCKASGYTFDDYEIHWVRQA |
| | | PGQGLEWIGVNDPESGGTFY |
| | | NQKFDGRATLTADKSTSTAY |
| | | MELSSLRSEDTAVYYCTRYD |
| | | KWDSFYGMDYWGQGTTVTVS |
| | | S |
| CH, CG1234, 235 | SEQ ID NO.: 574 | ASTKGPSVFPLAPSSKSTSG |
| MUT Z NONA | | GTAALGCLVKDYFPEPVTVS |
| | | WNSGALTSGVHTFPAVLQSS |
| | | GLYSLSSVVTVPSSSLGTQT |
| | | YICNVNHKPSNTKVDKKVEP |
| | | KSCDKTHTCPPCPAPEAAGG |
| | | PSVFLFPPKPKDTLMISRTP |
| | | EVTCVVVDVSHEDPEVKFNW |
| | | YVDGVEVHNAKTKPREEQYN |
| | | STYRVVSVLTVLHQDWLNGK |
| | | EYKCKVSNKALPAPIEKTIS |
| | | KAKGQPREPQVYTLPPSREE |
| | | MTKNQVSLTCLVKGFYPSDI |
| | | AVEWESNGQPENNYKTTPPV |
| | | LDSDGSFFLYSKLTVDKSRW |
| | | QQGNVFSCSVMHEALHNHYT |
| | | QKSLSLSPGK |
| DVD LIGHT | SEQ ID NO.: 575 | DIQMTQSPSSLSASVGDRVT |
| VARIABLE | | ITCKASQLVSSAVAWYQQKP |
| hMAK195-24-GS10- | | GKAPKLLIYWASTLHTGVPS |
| M10 DVD | | RFSGSGSGTDFTLTISSLQP |
| | | EDFATYYCQQHYRTPFTFGQ |
| | | GTKLEIKRGGSGGGGSGDIQ |
| | | MTQSPSSLSASVGDRVTITC |
| | | SASSGSISYIDWFQQKPGKA |
| | | PKRLIYATFELASGVPSRFS |
| | | GSGSGTDFTLTISSLQPEDF |
| | | ATYYCHQLGSYPDTFGQGTK |
| | | LEIKR |
| hMAK195-24VL | SEQ ID NO.: 576 | DIQMTQSPSSLSASVGDRVT |
| | | ITCKASQLVSSAVAWYQQKP |
| | | GKAPKLLIYWASTLHTGVPS |
| | | RFSGSGSGTDFTLTISSLQP |
| | | EDFATYYCQQHYRTPFTFGQ |
| | | GTKLEIKR |
| LINKER | SEQ ID NO.: 577 | GGSGGGGSG |
| H10F7-M10VL | SEQ ID NO.: 578 | DIQMTQSPSSLSASVGDRVT |
| | | ITCSASSGSISYIDWFQQKP |
| | | GKAPKRLIYATFELASGVPS |
| | | RFSGSGSGTDFTLTISSLQP |
| | | EDFATYYCHQLGSYPDTFGQ |
| | | GTKLEIKR |
| CL | SEQ ID NO.: 579 | TVAAPSVFIFPPSDEQLKSG |
| | | TASVVCLLNNFYPREAKVQW |
| | | KVDNALQSGNSQESVTEQDS |
| | | KDSTYSLSSTLTLSKADYEK |
| | | HKVYACEVTHQGLSSPVTKS |
| | | FNRGEC |
| DVD HEAVY | SEQ ID NO.: 580 | EVQLVESGGGLVQPGGSLRL |
| VARIABLE | | SCAASGFTFSNYGVTWVRQA |
| hMAK195-21-GS10- | | PGKGLEWVSMIWADGSTHYA |
| A6 DVD | | SSVKGRFTISRDNSKNTLYL |
| | | QMNSLRAEDTAVYYCAREWQ |
| | | HGPVAYWGQGTLVTVSSGGG |
| | | GSGGGGSEVQLVQSGAEVKK |
| | | PGSSVKVSCKASGYTFTDYE |
| | | IHWVRQAPGQGLEWIGVNDP |
| | | DSGGTLYNQKFDGRVTLTAD |
| | | ESTSTAYMELSSLRSEDTAV |
| | | YYCTRYDKWYSFEGMDIWGQ |
| | | GTTVTVSS |
| hMAK195-21Vh | SEQ ID NO.: 581 | EVQLVESGGGLVQPGGSLRL |
| | | SCAASGFTFSNYGVTWVRQA |
| | | PGKGLEWVSMIWADGSTHYA |
| | | SSVKGRFTISRDNSKNTLYL |
| | | QMNSLRAEDTAVYYCAREWQ |
| | | HGPVAYWGQGTLVTVSS |
| LINKER | SEQ ID NO.: 582 | GGGGSGGGGS |
| H10F7-A6 Vh | SEQ ID NO.: 583 | EVQLVQSGAEVKKPGSSVKV |
| | | SCKASGYTFTDYEIHWVRQA |
| | | PGQGLEWIGVNDPDSGGTLY |
| | | NQKFDGRVTLTADESTSTAY |
| | | MELSSLRSEDTAVYYCTRYD |
| | | KWYSFEGMDIWGQGTTVTVS |
| | | S |
| CH CG1 234, 235 | SEQ ID NO.: 584 | ASTKGPSVFPLAPSSKSTSG |
| MUT Z NONA | | GTAALGCLVKDYFPEPVTVS |
| | | WNSGALTSGVHTFPAVLQSS |
| | | GLYSLSSVVTVPSSSLGTQT |
| | | YICNVNHKPSNTKVDKKVEP |
| | | KSCDKTHTCPPCPAPEAAGG |
| | | PSVFLFPPKPKDTLMISRTP |
| | | EVTCVVVDVSHEDPEVKFNW |
| | | YVDGVEVHNAKTKPREEQYN |
| | | STYRVVSVLTVLHQDWLNGK |
| | | EYKCKVSNKALPAPIEKTIS |
| | | KAKGQPREPQVYTLPPSREE |
| | | MTKNQVSLTCLVKGFYPSDI |
| | | AVEWESNGQPENNYKTTPPV |
| | | LDSDGSFFLYSKLTVDKSRW |
| | | QQGNVFSCSVMHEALHNHYT |
| | | QKSLSLSPGK |
| DVD LIGHT | SEQ ID NO.: 585 | DIQMTQSPSSLSASVGDRVT |
| VARIABLE | | ITCRASQLVSSAVAWYQQKP |
| hMAK195-21-GS10- | | GKAPKLLIYWASARHTGVPS |
| A6 DVD | | RFSGSGSGTDFTLTISSLQP |
| | | EDFATYYCQQHYKTPFTFGQ |
| | | GTKLEIKRGGSGGGGSGDIQ |
| | | MTQSPSSLSASVGDRVTITC |
| | | SASQGIRSYIDWFQQKPGKS |
| | | PKRLIYATFDLASGVPSRFS |
| | | GSGSGTDYTLTISSLQPEDF |
| | | ATYYCRQVGNYPGTFGQGTK |
| | | LEIKR |
| hMAK195-21VL | SEQ ID NO.: 586 | DIQMTQSPSSLSASVGDRVT |
| | | ITCRASQLVSSAVAWYQQKP |
| | | GKAPKLLIYWASARHTGVPS |
| | | RFSGSGSGTDFTLTISSLQP |
| | | EDFATYYCQQHYKTPFTFGQ |
| | | GTKLEIKR |
| LINKER | SEQ ID NO.: 587 | GGSGGGGSG |
| H10F7-A6 VL | SEQ ID NO.: 588 | DIQMTQSPSSLSASVGDRVT |
| | | ITCSASQGIRSYIDWFQQKP |
| | | GKSPKRLIYATFDLASGVPS |
| | | RFSGSGSGTDYTLTISSLQP |
| | | EDFATYYCRQVGNYPGTFGQ |
| | | GTKLEIKR |
| CL | SEQ ID NO.: 589 | TVAAPSVFIFPPSDEQLKSG |
| | | TASVVCLLNNFYPREAKVQW |
| | | KVDNALQSGNSQESVTEQDS |
| | | KDSTYSLSSTLTLSKADYEK |
| | | HKVYACEVTHQGLSSPVTKS |
| | | FNRGEC |
| DVD HEAVY | SEQ ID NO.: 590 | EVQLVESGGGLVQPGGSLRL |
| VARIABLE | | SCAASGFTFSNYGVEWVRQA |
| hMAK195-24-GS10- | | PGKGLEWVSGIWADGSTHYA |
| A6 DVD | | DTVKSRFTISRDNSKNTLYL |
| | | QMNSLRAEDTAVYYCAREWQ |
| | | HGPVAYWGQGTLVTVSSGGG |
| | | GSGGGGSEVQLVQSGAEVKK |
| | | PGSSVKVSCKASGYTFTDYE |
| | | IHWVRQAPGQGLEWIGVNDP |
| | | DSGGTLYNQKFDGRVTLTAD |
| | | ESTSTAYMELSSLRSEDTAV |
| | | YYCTRYDKWYSFEGMDIWGQ |
| | | GTTVTVSS |
| hMAK195-24Vh | SEQ ID NO.: 591 | EVQLVESGGGLVQPGGSLRL |
| | | SCAASGFTFSNYGVEWVRQA |
| | | PGKGLEWVSGIWADGSTHYA |
| | | DTVKSRFTISRDNSKNTLYL |
| | | QMNSLRAEDTAVYYCAREWQ |
| | | HGPVAYWGQGTLVTVSS |
| LINKER | SEQ ID NO.: 592 | GGGGSGGGGS |
| H10F7-A6Vh | SEQ ID NO.: 593 | EVQLVQSGAEVKKPGSSVKV |
| | | SCKASGYTFTDYEIHWVRQA |
| | | PGQGLEWIGVNDPDSGGTLY |
| | | NQKFDGRVTLTADESTSTAY |
| | | MELSSLRSEDTAVYYCTRYD |
| | | KWYSFEGMDIWGQGTTVTVS |
| | | S |
| CH CG1 234, 235 | SEQ ID NO.: 594 | ASTKGPSVFPLAPSSKSTSG |
| MUT Z NONA | | GTAALGCLVKDYFPEPVTVS |
| | | WNSGALTSGVHTFPAVLQSS |
| | | GLYSLSSVVTVPSSSLGTQT |
| | | YICNVNHKPSNTKVDKKVEP |
| | | KSCDKTHTCPPCPAPEAAGG |
| | | PSVFLFPPKPKDTLMISRTP |
| | | EVTCVVVDVSHEDPEVKFNW |
| | | YVDGVEVHNAKTKPREEQYN |
| | | STYRVVSVLTVLHQDWLNGK |
| | | EYKCKVSNKALPAPIEKTIS |
| | | KAKGQPREPQVYTLPPSREE |
| | | MTKNQVSLTCLVKGFYPSDI |
| | | AVEWESNGQPENNYKTTPPV |
| | | LDSDGSFFLYSKLTVDKSRW |
| | | QQGNVFSCSVMHEALHNHYT |
| | | QKSLSLSPGK |
| DVD LIGHT | SEQ ID NO.: 595 | DIQMTQSPSSLSASVGDRVT |
| VARIABLE | | ITCKASQLVSSAVAWYQQKP |
| hMAK195-24-GS10- | | GKAPKLLIYWASTLHTGVPS |
| A6 DVD | | RFSGSGSGTDFTLTISSLQP |
| | | EDFATYYCQQHYRTPFTFGQ |
| | | GTKLEIKRGGSGGGGSGDIQ |
| | | MTQSPSSLSASVGDRVTITC |
| | | SASQGIRSYIDWFQQKPGKS |
| | | PKRLIYATFDLASGVPSRFS |
| | | GSGSGTDYTLTISSLQPEDF |
| | | ATYYCRQVGNYPGTFGQGTK |
| | | LEIKR |
| hMAK195-24VL | SEQ ID NO.: 596 | DIQMTQSPSSLSASVGDRVT |
| | | ITCKASQLVSSAVAWYQQKP |
| | | GKAPKLLIYWASTLHTGVPS |
| | | RFSGSGSGTDFTLTISSLQP |
| | | EDFATYYCQQHYRTPFTFGQ |
| | | GTKLEIKR |
| LINKER | SEQ ID NO.: 597 | GGSGGGGSG |
| H10F7-A6 VL | SEQ ID NO.: 598 | DIQMTQSPSSLSASVGDRVT |
| | | ITCSASQGIRSYIDWFQQKP |
| | | GKSPKRLIYATFDLASGVPS |
| | | RFSGSGSGTDYTLTISSLQP |
| | | EDFATYYCRQVGNYPGTFGQ |
| | | GTKLEIKR |
| CL | SEQ ID NO.: 599 | TVAAPSVFIFPPSDEQLKSG |
| | | TASVVCLLNNFYPREAKVQW |
| | | KVDNALQSGNSQESVTEQDS |
| | | KDSTYSLSSTLTLSKADYEK |
| | | HKVYACEVTHQGLSSPVTKS |
| | | FNRGEC |
| DVD HEAVY | SEQ ID NO.: 600 | EVQLVESGGGLVQPGGSLRL |
| VARIABLE | | SCAASGFTFSNYGVTWVRQA |
| hMAK195-21-GS10- | | PGKGLEWVSMIWADGSTHYA |
| A16 DVD | | SSVKGRFTISRDNSKNTLYL |
| | | QMNSLRAEDTAVYYCAREWQ |
| | | HGPVAYWGQGTLVTVSSGGG |
| | | GSGGGGSEVQLVQSGAEVKK |
| | | PGSSVKVSCKASGYTFSDYE |
| | | IHWVRQAPGQGLEWMGVNDP |
| | | ESGGTFYNQKFDGRVTLTAD |
| | | ESTSTAYMELSSLRSEDTAV |
| | | YYCTRYDKWYSFEGMDIWGQ |
| | | GTTVTVSS |
| hMAK195-21Vh | SEQ ID NO.: 601 | EVQLVESGGGLVQPGGSLRL |
| | | SCAASGFTFSNYGVTWVRQA |
| | | PGKGLEWVSMIWADGSTHYA |
| | | SSVKGRFTISRDNSKNTLYL |
| | | QMNSLRAEDTAVYYCAREWQ |
| | | HGPVAYWGQGTLVTVSS |
| LINKER | SEQ ID NO.: 602 | GGGGSGGGGS |
| H10F7-A16Vh | SEQ ID NO.: 603 | EVQLVQSGAEVKKPGSSVKV |
| | | SCKASGYTFSDYEIHWVRQA |
| | | PGQGLEWMGVNDPESGGTFY |
| | | NQKFDGRVTLTADESTSTAY |
| | | MELSSLRSEDTAVYYCTRYD |
| | | KWYSFEGMDIWGQGTTVTVS |
| | | S |
| CH CG1, 234, 235 | SEQ ID NO.: 604 | ASTKGPSVFPLAPSSKSTSG |
| MUT Z NONA | | GTAALGCLVKDYFPEPVTVS |
| | | WNSGALTSGVHTFPAVLQSS |
| | | GLYSLSSVVTVPSSSLGTQT |
| | | YICNVNHKPSNTKVDKKVEP |
| | | KSCDKTHTCPPCPAPEAAGG |
| | | PSVFLFPPKPKDTLMISRTP |
| | | EVTCVVVDVSHEDPEVKFNW |
| | | YVDGVEVHNAKTKPREEQYN |
| | | STYRVVSVLTVLHQDWLNGK |
| | | EYKCKVSNKALPAPIEKTIS |
| | | KAKGQPREPQVYTLPPSREE |
| | | MTKNQVSLTCLVKGFYPSDI |
| | | AVEWESNGQPENNYKTTPPV |
| | | LDSDGSFFLYSKLTVDKSRW |
| | | QQGNVFSCSVMHEALHNHYT |
| | | QKSLSLSPGK |
| DVD HEAVY | SEQ ID NO.: 605 | EVQLVESGGGLVQPGGSLRL |
| VARIABLE | | SCAASGFTFSNYGVEWVRQA |
| hMAK195-24-GS10- | | PGKGLEWVSGIWADGSTHYA |
| A16 DVD | | DTVKSRFTISRDNSKNTLYL |
| | | QMNSLRAEDTAVYYCAREWQ |
| | | HGPVAYWGQGTLVTVSSGGG |
| | | GSGGGGSEVQLVQSGAEVKK |
| | | PGSSVKVSCKASGYTFSDYE |
| | | IHWVRQAPGQGLEWMGVNDP |
| | | ESGGTFYNQKFDGRVTLTAD |
| | | ESTSTAYMELSSLRSEDTAV |
| | | YYCTRYDKWYSFEGMDIWGQ |
| | | GTTVTVSS |
| hMAK195-24Vh | SEQ ID NO.: 606 | EVQLVESGGGLVQPGGSLRL |
| | | SCAASGFTFSNYGVEWVRQA |
| | | PGKGLEWVSGIWADGSTHYA |
| | | DTVKSRFTISRDNSKNTLYL |
| | | QMNSLRAEDTAVYYCAREWQ |
| | | HGPVAYWGQGTLVTVSS |
| LINKER | SEQ ID NO.: 607 | GGGGSGGGGS |
| H10F7-A16Vh | SEQ ID NO.: 608 | EVQLVQSGAEVKKPGSSVKV |
| | | SCKASGYTFSDYEIHWVRQA |
| | | PGQGLEWMGVNDPESGGTFY |
| | | NQKFDGRVTLTADESTSTAY |
| | | MELSSLRSEDTAVYYCTRYD |
| | | KWYSFEGMDIWGQGTTVTVS |
| | | S |
| CH CG1, | SEQ ID NO.: 609 | ASTKGPSVFPLAPSSKSTSG |
| 234, 235 MUT | | GTAALGCLVKDYFPEPVTVS |
| Z NONA | | WNSGALTSGVHTFPAVLQSS |
| | | GLYSLSSVVTVPSSSLGTQT |
| | | YICNVNHKPSNTKVDKKVEP |
| | | KSCDKTHTCPPCPAPEAAGG |
| | | PSVFLFPPKPKDTLMISRTP |
| | | EVTCVVVDVSHEDPEVKFNW |
| | | YVDGVEVHNAKTKPREEQYN |
| | | STYRVVSVLTVLHQDWLNGK |
| | | EYKCKVSNKALPAPIEKTIS |
| | | KAKGQPREPQVYTLPPSREE |
| | | MTKNQVSLTCLVKGFYPSDI |
| | | AVEWESNGQPENNYKTTPPV |
| | | LDSDGSFFLYSKLTVDKSRW |
| | | QQGNVFSCSVMHEALHNHYT |
| | | QKSLSLSPGK |
| DVD HEAVY | SEQ ID NO.: 610 | EVQLVESGGGLVQPGGSLRL |
| VARIABLE | | SCAASGFTFSNYGVTWVRQA |
| hMAK195-21-GS10- | | PGKGLEWVSMIWADGSTHYA |
| A11 DVD | | SSVKGRFTISRDNSKNTLYL |
| | | QMNSLRAEDTAVYYCAREWQ |
| | | HGPVAYWGQGTLVTVSSGGG |
| | | GSGGGGSEVQLVQSGAEVKK |
| | | PGSSVKVSCKASGYTFTDYE |
| | | IHWVRQAPGQGLEWIGVNDP |
| | | ESGGTFYNQKFDGRVTLSAD |
| | | ESTSTAYMELSSLRSEDTAV |
| | | YYCTRYDKYWSFEGMDYWGQ |
| | | GTTVTVSS |
| hMAK195-21Vh | SEQ ID NO.: 611 | EVQLVESGGGLVQPGGSLRL |
| | | SCAASGFTFSNYGVTWVRQA |
| | | PGKGLEWVSMIWADGSTHYA |
| | | SSVKGRFTISRDNSKNTLYL |
| | | QMNSLRAEDTAVYYCAREWQ |
| | | HGPVAYWGQGTLVTVSS |
| LINKER | SEQ ID NO.: 612 | GGGGSGGGGS |
| H10F7-A11Vh | SEQ ID NO.: 613 | EVQLVQSGAEVKKPGSSVKV |
| | | SCKASGYTFTDYEIHWVRQA |
| | | PGQGLEWIGVNDPESGGTFY |
| | | NQKFDGRVTLSADESTSTAY |
| | | MELSSLRSEDTAVYYCTRYD |
| | | KYWSFEGMDYWGQGTTVTVS |
| | | S |
| CH CG1234, 235 | SEQ ID NO.: 614 | ASTKGPSVFPLAPSSKSTSG |
| MUT Z NONA | | GTAALGCLVKDYFPEPVTVS |
| | | WNSGALTSGVHTFPAVLQSS |
| | | GLYSLSSVVTVPSSSLGTQT |
| | | YICNVNHKPSNTKVDKKVEP |
| | | KSCDKTHTCPPCPAPEAAGG |
| | | PSVFLFPPKPKDTLMISRTP |
| | | EVTCVVVDVSHEDPEVKFNW |
| | | YVDGVEVHNAKTKPREEQYN |
| | | STYRVVSVLTVLHQDWLNGK |
| | | EYKCKVSNKALPAPIEKTIS |
| | | KAKGQPREPQVYTLPPSREE |
| | | MTKNQVSLTCLVKGFYPSDI |
| | | AVEWESNGQPENNYKTTPPV |
| | | LDSDGSFFLYSKLTVDKSRW |
| | | QQGNVFSCSVMHEALHNHYT |
| | | QKSLSLSPGK |
| DVD HEAVY | SEQ ID NO.: 615 | EVQLVESGGGLVQPGGSLRL |
| VARIABLE | | SCAASGFTFSNYGVTWVRQA |
| hMAK195-24-GS10- | | PGKGLEWVSGIWADGSTHYA |
| A11 DVD | | DTVKSRFTISRDNSKNTLYL |
| | | QMNSLRAEDTAVYYCAREWQ |
| | | HGPVAYWGQGTLVTVSSGGG |
| | | GSGGGGSEVQLVQSGAEVKK |
| | | PGSSVKVSCKASGYTFTDYE |
| | | IHWVRQAPGQGLEWIGVNDP |
| | | ESGGTFYNQKFDGRVTLSAD |
| | | ESTSTAYMELSSLRSEDTAV |
| | | YYCTRYDKYWSFEGMDYWGQ |
| | | GTTVTVSS |
| hMAK195-21Vh | SEQ ID NO.: 616 | EVQLVESGGGLVQPGGSLRL |
| | | SCAASGFTFSNYGVEWVRQA |
| | | PGKGLEWVSGIWADGSTHYA |
| | | DTVKSRFTISRDNSKNTLYL |
| | | QMNSLRAEDTAVYYCAREWQ |
| | | HGPVAYWGQGTLVTVSS |
| LINKER | SEQ ID NO.: 617 | GGGGSGGGGS |
| H10F7-A11Vh | SEQ ID NO.: 618 | EVQLVQSGAEVKKPGSSVKV |
| | | SCKASGYTFTDYEIHWVRQA |
| | | PGQGLEWIGVNDPESGGTFY |
| | | NQKFDGRVTLSADESTSTAY |
| | | MELSSLRSEDTAVYYCTRYD |
| | | KYWSFEGMDYWGQGTTVTVS |
| | | S |
| CH CG1 234, 235 | SEQ ID NO.: 619 | ASTKGPSVFPLAPSSKSTSG |
| MUT Z NONA | | GTAALGCLVKDYFPEPVTVS |
| | | WNSGALTSGVHTFPAVLQSS |
| | | GLYSLSSVVTVPSSSLGTQT |
| | | YICNVNHKPSNTKVDKKVEP |
| | | KSCDKTHTCPPCPAPEAAGG |
| | | PSVFLFPPKPKDTLMISRTP |
| | | EVTCVVVDVSHEDPEVKFNW |
| | | YVDGVEVHNAKTKPREEQYN |
| | | STYRVVSVLTVLHQDWLNGK |
| | | EYKCKVSNKALPAPIEKTIS |
| | | KAKGQPREPQVYTLPPSREE |
| | | MTKNQVSLTCLVKGFYPSDI |
| | | AVEWESNGQPENNYKTTPPV |
| | | LDSDGSFFLYSKLTVDKSRW |
| | | QQGNVFSCSVMHEALHNHYT |
| | | QKSLSLSPGK |
| DVD HEAVY | SEQ ID NO.: 620 | EVQLVESGGGLVQPGGSLRL |
| VARIABLE | | SCAASGFTFSNYGVTWVRQA |
| hMAK195-21-GS10- | | PGKGLEWVSMIWADGSTHYA |
| B13 DVD | | SSVKGRFTISRDNSKNTLYL |
| | | QMNSLRAEDTAVYYCAREWQ |
| | | HGPVAYWGQGTLVTVSSGGG |
| | | GSGGGGSEVQLVQSGAEVKK |
| | | PGSSVKVSCKASGYTFSDYE |
| | | IHWVRQAPGQGLEWMGVNDP |
| | | ESGGTFYNQKFDGRVTLTAD |
| | | ESTSTAYMELSSLRSEDTAV |
| | | YYCTRYDKYWSFEGMDYWGQ |
| | | GTTVTVSS |
| hMAK195-21Vh | SEQ ID NO.: 621 | EVQLVESGGGLVQPGGSLRL |
| | | SCAASGFTFSNYGVTWVRQA |
| | | PGKGLEWVSMIWADGSTHYA |
| | | SSVKGRFTISRDNSKNTLYL |
| | | QMNSLRAEDTAVYYCAREWQ |
| | | HGPVAYWGQGTLVTVSS |
| LINKER | SEQ ID NO.: 622 | GGGGSGGGGS |
| H10F7-B13Vh | SEQ ID NO.: 623 | EVQLVQSGAEVKKPGSSVKV |
| | | SCKASGYTFSDYEIHWVRQA |
| | | PGQGLEWMGVNDPESGGTFY |
| | | NQKFDGRVTLTADESTSTAY |
| | | MELSSLRSEDTAVYYCTRYD |
| | | KYWSFEGMDYWGQGTTVTVS |
| | | S |
| CH CG1, 234, 235 | SEQ ID NO.: 624 | ASTKGPSVFPLAPSSKSTSG |
| MUT Z NONA | | GTAALGCLVKDYFPEPVTVS |
| | | WNSGALTSGVHTFPAVLQSS |
| | | GLYSLSSVVTVPSSSLGTQT |
| | | YICNVNHKPSNTKVDKKVEP |
| | | KSCDKTHTCPPCPAPEAAGG |
| | | PSVFLFPPKPKDTLMISRTP |
| | | EVTCVVVDVSHEDPEVKFNW |
| | | YVDGVEVHNAKTKPREEQYN |
| | | STYRVVSVLTVLHQDWLNGK |
| | | EYKCKVSNKALPAPIEKTIS |
| | | KAKGQPREPQVYTLPPSREE |
| | | MTKNQVSLTCLVKGFYPSDI |
| | | AVEWESNGQPENNYKTTPPV |
| | | LDSDGSFFLYSKLTVDKSRW |
| | | QQGNVFSCSVMHEALHNHYT |
| | | QKSLSLSPGK |
| DVD HEAVY | SEQ ID NO.: 625 | EVQLVESGGGLVQPGGSLRL |
| VARIABLE | | SCAASGFTFSNYGVEWVRQA |
| hMAK195-24-GS10- | | PGKGLEWVSGIWADGSTHYA |
| B13 DVD | | DTVKSRFTISRDNSKNTLYL |
| | | QMNSLRAEDTAVYYCAREWQ |
| | | HGPVAYWGQGTLVTVSSGGG |
| | | GSGGGGSEVQLVQSGAEVKK |
| | | PGSSVKVSCKASGYTFSDYE |
| | | IHWVRQAPGQGLEWMGVNDP |
| | | ESGGTFYNQKFDGRVTLTAD |
| | | ESTSTAYMELSSLRSEDTAV |
| | | YYCTRYDKYWSFEGMDYWGQ |
| | | GTTVTVSS |
| hMAK195-24Vh | SEQ ID NO.: 626 | EVQLVESGGGLVQPGGSLRL |
| | | SCAASGFTFSNYGVEWVRQA |
| | | PGKGLEWVSGIWADGSTHYA |
| | | DTVKSRFTISRDNSKNTLYL |
| | | QMNSLRAEDTAVYYCAREWQ |
| | | HGPVAYWGQGTLVTVSS |
| LINKER | SEQ ID NO.: 627 | GGGGSGGGGS |
| H10F7-B13 Vh | SEQ ID NO.: 628 | EVQLVQSGAEVKKPGSSVKV |
| | | SCKASGYTFSDYEIHWVRQA |
| | | PGQGLEWMGVNDPESGGTFY |
| | | NQKFDGRVTLTADESTSTAY |
| | | MELSSLRSEDTAVYYCTRYD |
| | | KYWSFEGMDYWGQGTTVTVS |
| | | S |
| CH CG1, | SEQ ID NO.: 629 | ASTKGPSVFPLAPSSKSTSG |
| 234, 235 MUT | | GTAALGCLVKDYFPEPVTVS |
| Z NONA | | WNSGALTSGVHTFPAVLQSS |
| | | GLYSLSSVVTVPSSSLGTQT |
| | | YICNVNHKPSNTKVDKKVEP |
| | | KSCDKTHTCPPCPAPEAAGG |
| | | PSVFLFPPKPKDTLMISRTP |
| | | EVTCVVVDVSHEDPEVKFNW |
| | | YVDGVEVHNAKTKPREEQYN |
| | | STYRVVSVLTVLHQDWLNGK |
| | | EYKCKVSNKALPAPIEKTIS |
| | | KAKGQPREPQVYTLPPSREE |
| | | MTKNQVSLTCLVKGFYPSDI |
| | | AVEWESNGQPENNYKTTPPV |
| | | LDSDGSFFLYSKLTVDKSRW |
| | | QQGNVFSCSVMHEALHNHYT |
| | | QKSLSLSPGK |
| DVD HEAVY | SEQ ID NO.: 630 | EVQLVESGGGLVQPGGSLRL |
| VARIABLE | | SCAASGFTFSNYGVTWVRQA |
| hMAK195-21-GS10- | | PGKGLEWVSMIWADGSTHYA |
| B20 DVD | | SSVKGRFTISRDNSKNTLYL |
| | | QMNSLRAEDTAVYYCAREWQ |
| | | HGPVAYWGQGTLVTVSSGGG |
| | | GSGGGGSEVQLVQSGAEVKK |
| | | PGSSVKVSCKASGYTFTDYE |
| | | IHWVRQAPGQGLEWMGVNDP |
| | | ESGGTFYNQKFDGRVTLTAD |
| | | ESTSTAYMELSSLRSEDTAV |
| | | YYCTRYDKWYSFEGMDIWGQ |
| | | GTTVTVSS |
| hMAK195-21Vh | SEQ ID NO.: 631 | EVQLVESGGGLVQPGGSLRL |
| | | SCAASGFTFSNYGVTWVRQA |
| | | PGKGLEWVSMIWADGSTHYA |
| | | SSVKGRFTISRDNSKNTLYL |
| | | QMNSLRAEDTAVYYCAREWQ |
| | | HGPVAYWGQGTLVTVSS |
| LINKER | SEQ ID NO.: 632 | GGGGSGGGGS |
| H10F7-B20Vh | SEQ ID NO.: 633 | EVQLVQSGAEVKKPGSSVKV |
| | | SCKASGYTFTDYEIHWVRQA |
| | | PGQGLEWMGVNDPESGGTFY |
| | | NQKFDGRVTLTADESTSTAY |
| | | MELSSLRSEDTAVYYCTRYD |
| | | KWYSFEGMDIWGQGTTVTVS |
| | | S |
| CH CG1234, 235 | SEQ ID NO.: 634 | ASTKGPSVFPLAPSSKSTSG |
| MUT Z NONA | | GTAALGCLVKDYFPEPVTVS |
| | | WNSGALTSGVHTFPAVLQSS |
| | | GLYSLSSVVTVPSSSLGTQT |
| | | YICNVNHKPSNTKVDKKVEP |
| | | KSCDKTHTCPPCPAPEAAGG |
| | | PSVFLFPPKPKDTLMISRTP |
| | | EVTCVVVDVSHEDPEVKFNW |
| | | YVDGVEVHNAKTKPREEQYN |
| | | STYRVVSVLTVLHQDWLNGK |
| | | EYKCKVSNKALPAPIEKTIS |
| | | KAKGQPREPQVYTLPPSREE |
| | | MTKNQVSLTCLVKGFYPSDI |
| | | AVEWESNGQPENNYKTTPPV |
| | | LDSDGSFFLYSKLTVDKSRW |
| | | QQGNVFSCSVMHEALHNHYT |
| | | QKSLSLSPGK |
| DVD HEAVY | SEQ ID NO.: 635 | EVQLVESGGGLVQPGGSLRL |
| VARIABLE | | SCAASGFTFSNYGVEWVRQA |
| hMAK195-24-GS10- | | PGKGLEWVSGIWADGSTHYA |
| B20 DVD | | DTVKSRFTISRDNSKNTLYL |
| | | QMNSLRAEDTAVYYCAREWQ |
| | | HGPVAYWGQGTLVTVSSGGG |
| | | GSGGGGSEVQLVQSGAEVKK |
| | | PGSSVKVSCKASGYTFTDYE |
| | | IHWVRQAPGQGLEWMGVNDP |
| | | ESGGTFYNQKFDGRVTLTAD |
| | | ESTSTAYMELSSLRSEDTAV |
| | | YYCTRYDKWYSFEGMDIWGQ |
| | | GTTVTVSS |
| hMAK195-24Vh | SEQ ID NO.: 636 | EVQLVESGGGLVQPGGSLRL |
| | | SCAASGFTFSNYGVEWVRQA |
| | | PGKGLEWVSGIWADGSTHYA |
| | | DTVKSRFTISRDNSKNTLYL |
| | | QMNSLRAEDTAVYYCAREWQ |
| | | HGPVAYWGQGTLVTVSS |
| LINKER | SEQ ID NO.: 637 | GGGGSGGGGS |
| H10F7-B20Vh | SEQ ID NO.: 638 | EVQLVQSGAEVKKPGSSVKV |
| | | SCKASGYTFTDYEIHWVRQA |
| | | PGQGLEWMGVNDPESGGTFY |
| | | NQKFDGRVTLTADESTSTAY |
| | | MELSSLRSEDTAVYYCTRYD |
| | | KWYSFEGMDIWGQGTTVTVS |
| | | S |
| CH CG1 234, 235 | SEQ ID NO.: 639 | ASTKGPSVFPLAPSSKSTSG |
| MUT Z NONA | | GTAALGCLVKDYFPEPVTVS |
| | | WNSGALTSGVHTFPAVLQSS |
| | | GLYSLSSVVTVPSSSLGTQT |
| | | YICNVNHKPSNTKVDKKVEP |
| | | KSCDKTHTCPPCPAPEAAGG |
| | | PSVFLFPPKPKDTLMISRTP |
| | | EVTCVVVDVSHEDPEVKFNW |
| | | YVDGVEVHNAKTKPREEQYN |
| | | STYRVVSVLTVLHQDWLNGK |
| | | EYKCKVSNKALPAPIEKTIS |
| | | KAKGQPREPQVYTLPPSREE |
| | | MTKNQVSLTCLVKGFYPSDI |
| | | AVEWESNGQPENNYKTTPPV |
| | | LDSDGSFFLYSKLTVDKSRW |
| | | QQGNVFSCSVMHEALHNHYT |
| | | QKSLSLSPGK |
| DVD HEAVY | SEQ ID NO.: 640 | EVQLVQSGAEVKKPGSSVKV |
| VARIABLE | | SCKASGYTFDDYEIHWVRQA |
| H10F7-M10-GS10- | | PGQGLEWIGVNDPESGGTFY |
| HMAK195-21 DVD | | NQKFDGRATLTADKSTSTAY |
| | | MELSSLRSEDTAVYYCTRYD |
| | | KWDSFYGMDYWGQGTTVTVS |
| | | SGGGGSGGGGSEVQLVESGG |
| | | GLVQPGGSLRLSCAASGFTF |
| | | SNYGVTWVRQAPGKGLEWVS |
| | | MIWADGSTHYASSVKGRFTI |
| | | SRDNSKNTLYLQMNSLRAED |
| | | TAVYYCAREWQHGPVAYWGQ |
| | | GTLVTVSS |
| H10F7-M10Vh | SEQ ID NO.: 641 | EVQLVQSGAEVKKPGSSVKV |
| | | SCKASGYTFDDYEIHWVRQA |
| | | PGQGLEWIGVNDPESGGTFY |
| | | NQKFDGRATLTADKSTSTAY |
| | | MELSSLRSEDTAVYYCTRYD |
| | | KWDSFYGMDYWGQGTTVTVS |
| | | S |
| LINKER | SEQ ID NO.: 642 | GGGGSGGGGS |
| HMAK195-21 Vh | SEQ ID NO.: 643 | EVQLVESGGGLVQPGGSLRL |
| | | SCAASGFTFSNYGVTWVRQA |
| | | PGKGLEWVSMIWADGSTHYA |
| | | SSVKGRFTISRDNSKNTLYL |
| | | QMNSLRAEDTAVYYCAREWQ |
| | | HGPVAYWGQGTLVTVSS |
| CH CG1, 234, 235 | SEQ ID NO.: 644 | ASTKGPSVFPLAPSSKSTSG |
| MUT Z NONA | | GTAALGCLVKDYFPEPVTVS |
| | | WNSGALTSGVHTFPAVLQSS |
| | | GLYSLSSVVTVPSSSLGTQT |
| | | YICNVNHKPSNTKVDKKVEP |
| | | KSCDKTHTCPPCPAPEAAGG |
| | | PSVFLFPPKPKDTLMISRTP |
| | | EVTCVVVDVSHEDPEVKFNW |
| | | YVDGVEVHNAKTKPREEQYN |
| | | STYRVVSVLTVLHQDWLNGK |
| | | EYKCKVSNKALPAPIEKTIS |
| | | KAKGQPREPQVYTLPPSREE |
| | | MTKNQVSLTCLVKGFYPSDI |
| | | AVEWESNGQPENNYKTTPPV |
| | | LDSDGSFFLYSKLTVDKSRW |
| | | QQGNVFSCSVMHEALHNHYT |
| | | QKSLSLSPGK |
| DVD LIGHT | SEQ ID NO.: 645 | DIQMTQSPSSLSASVGDRVT |
| VARIABLE | | ITCSASSGSISYIDWFQQKP |
| h10F7-M10-GS10- | | GKAPKRLIYATFELASGVPS |
| hMAK195-21 DVD | | RFSGSGSGTDFTLTISSLQP |
| | | EDFATYYCHQLGSYPDTFGQ |
| | | GTKLEIKRGGSGGGGSGDIQ |
| | | MTQSPSSLSASVGDRVTITC |
| | | RASQLVSSAVAWYQQKPGKA |
| | | PKLLIYWASARHTGVPSRFS |
| | | GSGSGTDFTLTISSLQPEDF |
| | | ATYYCQQHYKTPFTFGQGTK |
| | | LEIKR |
| H10F7-M10VL | SEQ ID NO.: 646 | DIQMTQSPSSLSASVGDRVT |
| | | ITCSASSGSISYIDWFQQKP |
| | | GKAPKRLIYATFELASGVPS |
| | | RFSGSGSGTDFTLTISSLQP |
| | | EDFATYYCHQLGSYPDTFGQ |
| | | GTKLEIKR |
| LINKER | SEQ ID NO.: 647 | GGSGGGGSG |
| HMAK195-21VL | SEQ ID NO.: 648 | DIQMTQSPSSLSASVGDRVT |
| | | ITCRASQLVSSAVAWYQQKP |
| | | GKAPKLLIYWASARHTGVPS |
| | | RFSGSGSGTDFTLTISSLQP |
| | | EDFATYYCQQHYKTPFTFGQ |
| | | GTKLEIKR |
| CL | SEQ ID NO.: 649 | TVAAPSVFIFPPSDEQLKSG |
| | | TASVVCLLNNFYPREAKVQW |
| | | KVDNALQSGNSQESVTEQDS |
| | | KDSTYSLSSTLTLSKADYEK |
| | | HKVYACEVTHQGLSSPVTKS |
| | | FNRGEC |
| DVD HEAVY | SEQ ID NO.: 650 | EVQLVQSGAEVKKPGSSVKV |
| VARIABLE | | SCKASGYTFDDYEIHWVRQA |
| H10F7-M10-GS10- | | PGQGLEWIGVNDPESGGTFY |
| HMAK195-24 DVD | | NQKFDGRATLTADKSTSTAY |
| | | MELSSLRSEDTAVYYCTRYD |
| | | KWDSFYGMDYWGQGTTVTVS |
| | | SGGGGSGGGGSEVQLVESGG |
| | | GLVQPGGSLRLSCAASGFTF |
| | | SNYGVEWVRQAPGKGLEWVS |
| | | GIWADGSTHYADTVKSRFTI |
| | | SRDNSKNTLYLQMNSLRAED |
| | | TAVYYCAREWQHGPVAYWGQ |
| | | GTLVTVSS |
| H10F7-M10Vh | SEQ ID NO.: 651 | EVQLVQSGAEVKKPGSSVKV |
| | | SCKASGYTFDDYEIHWVRQA |
| | | PGQGLEWIGVNDPESGGTFY |
| | | NQKFDGRATLTADKSTSTAY |
| | | MELSSLRSEDTAVYYCTRYD |
| | | KWDSFYGMDYWGQGTTVTVS |
| | | S |
| LINKER | SEQ ID NO.: 652 | GGGGSGGGGS |
| HMAK195-24 Vh | SEQ ID NO.: 653 | EVQLVESGGGLVQPGGSLRL |
| | | SCAASGFTFSNYGVEWVRQA |
| | | PGKGLEWVSGIWADGSTHYA |
| | | DTVKSRFTISRDNSKNTLYL |
| | | QMNSLRAEDTAVYYCAREWQ |
| | | HGPVAYWGQGTLVTVSS |
| CH CG1. | SEQ ID NO.: 654 | ASTKGPSVFPLAPSSKSTSG |
| 234, 235 MUT | | GTAALGCLVKDYFPEPVTVS |
| Z NONA | | WNSGALTSGVHTFPAVLQSS |
| | | GLYSLSSVVTVPSSSLGTQT |
| | | YICNVNHKPSNTKVDKKVEP |
| | | KSCDKTHTCPPCPAPEAAGG |
| | | PSVFLFPPKPKDTLMISRTP |
| | | EVTCVVVDVSHEDPEVKFNW |
| | | YVDGVEVHNAKTKPREEQYN |
| | | STYRVVSVLTVLHQDWLNGK |
| | | EYKCKVSNKALPAPIEKTIS |
| | | KAKGQPREPQVYTLPPSREE |
| | | MTKNQVSLTCLVKGFYPSDI |
| | | AVEWESNGQPENNYKTTPPV |
| | | LDSDGSFFLYSKLTVDKSRW |
| | | QQGNVFSCSVMHEALHNHYT |
| | | QKSLSLSPGK |
| DVD LIGHT | SEQ ID NO.: 655 | DIQMTQSPSSLSASVGDRVT |
| VARIABLE | | ITCSASSGSISYIDWFQQKP |
| h10F7-M10-GS10- | | GKAPKRLIYATFELASGVPS |
| hMAK195-24 DVD | | RFSGSGSGTDFTLTISSLQP |
| | | EDFATYYCHQLGSYPDTFGQ |
| | | GTKLEIKRGGSGGGGSGDIQ |
| | | MTQSPSSLSASVGDRVTITC |
| | | KASQLVSSAVAWYQQKPGKA |
| | | PKLLIYWASTLHTGVPSRFS |
| | | GSGSGTDFTLTISSLQPEDF |
| | | ATYYCQQHYRTPFTFGQGTK |
| | | LEIKR |
| H10F7-M10VL | SEQ ID NO.: 656 | DIQMTQSPSSLSASVGDRVT |
| | | ITCSASSGSISYIDWFQQKP |
| | | GKAPKRLIYATFELASGVPS |
| | | RFSGSGSGTDFTLTISSLQP |
| | | EDFATYYCHQLGSYPDTFGQ |
| | | GTKLEIKR |
| LINKER | SEQ ID NO.: 657 | GGSGGGGSG |
| HMAK195-24VL | SEQ ID NO.: 658 | DIQMTQSPSSLSASVGDRVT |
| | | ITCKASQLVSSAVAWYQQKP |
| | | GKAPKLLIYWASTLHTGVPS |
| | | RFSGSGSGTDFTLTISSLQP |
| | | EDFATYYCQQHYRTPFTFGQ |
| | | GTKLEIKR |
| CL | SEQ ID NO.: 659 | TVAAPSVFIFPPSDEQLKSG |
| | | TASVVCLLNNFYPREAKVQW |
| | | KVDNALQSGNSQESVTEQDS |
| | | KDSTYSLSSTLTLSKADYEK |
| | | HKVYACEVTHQGLSSPVTKS |
| | | FNRGEC |
| DVD HEAVY | SEQ ID NO.: 660 | EVQLVQSGAEVKKPGASVKV |
| VARIABLE | | SCKASGYTFANYGIIWVRQA |
| HMAK199-1-GS10- | | PGQGLEWMGWINTYTGKPTY |
| H10F7-M11 DVD | | AQKFQGRVTMTTDTSTSTAY |
| | | MELSSLRSEDTAVYYCARKL |
| | | FTTMDVTDNAMDYWGQGTTV |
| | | TVSSGGGGSGGGGSEVQLVQ |
| | | SGAEVKKPGSSVKVSCKASG |
| | | YTFTDYEIHWVRQAPGQGLE |
| | | WMGVNDPESGGTFYNQKFDG |
| | | RVTLTADESTSTAYMELSSL |
| | | RSEDTAVYYCTRYSKWDSFD |
| | | GMDYWGQGTTVTVSS |
| HMAK199-1Vh | SEQ ID NO.: 661 | EVQLVQSGAEVKKPGASVKV |
| | | SCKASGYTFANYGIIWVRQA |
| | | PGQGLEWMGWINTYTGKPTY |
| | | AQKFQGRVTMTTDTSTSTAY |
| | | MELSSLRSEDTAVYYCARKL |
| | | FTTMDVTDNAMDYWGQGTTV |
| | | TVSS |
| LINKER | SEQ ID NO.: 662 | GGGGSGGGGS |
| H10F7-M11 Vh | SEQ ID NO.: 663 | EVQLVQSGAEVKKPGSSVKV |
| | | SCKASGYTFTDYEIHWVRQA |
| | | PGQGLEWMGVNDPESGGTFY |
| | | NQKFDGRVTLTADESTSTAY |
| | | MELSSLRSEDTAVYYCTRYS |
| | | KWDSFDGMDYWGQGTTVTVS |
| | | S |
| CH CG1234, 235 | SEQ ID NO.: 664 | ASTKGPSVFPLAPSSKSTSG |
| MUT Z NONA | | GTAALGCLVKDYFPEPVTVS |
| | | WNSGALTSGVHTFPAVLQSS |
| | | GLYSLSSVVTVPSSSLGTQT |
| | | YICNVNHKPSNTKVDKKVEP |
| | | KSCDKTHTCPPCPAPEAAGG |
| | | PSVFLFPPKPKDTLMISRTP |
| | | EVTCVVVDVSHEDPEVKFNW |
| | | YVDGVEVHNAKTKPREEQYN |
| | | STYRVVSVLTVLHQDWLNGK |
| | | EYKCKVSNKALPAPIEKTIS |
| | | KAKGQPREPQVYTLPPSREE |
| | | MTKNQVSLTCLVKGFYPSDI |
| | | AVEWESNGQPENNYKTTPPV |
| | | LDSDGSFFLYSKLTVDKSRW |
| | | QQGNVFSCSVMHEALHNHYT |
| | | QKSLSLSPGK |
| DVD LIGHT | SEQ ID NO.: 665 | DIQMTQSPSSLSASVGDRVT |
| VARIABLE | | ITCRASQDISQYLNWYQQKP |
| HMAK199-1-GS10- | | GKAPKLLIYYTSRLQSGVPS |
| H10F7-M11DVD | | RFSGSGSGTDFTLTISSLQP |
| | | EDFATYFCQQGNTWPPTFGQ |
| | | GTKLEIKRGGSGGGGSGDIQ |
| | | MTQSPSSLSASVGDRVTITC |
| | | RASSGIISYIDWFQQKPGKA |
| | | PKRLIYATFDLASGVPSRFS |
| | | GSGSGTDYTLTISSLQPEDF |
| | | ATYYCRQVGSYPETFGQGTK |
| | | LEIKR |
| HMAK199-1 VL | SEQ ID NO.: 666 | DIQMTQSPSSLSASVGDRVT |
| | | ITCRASQDISQYLNWYQQKP |
| | | GKAPKLLIYYTSRLQSGVPS |
| | | RFSGSGSGTDFTLTISSLQP |
| | | EDFATYFCQQGNTWPPTFGQ |
| | | GTKLEIKR |
| LINKER | SEQ ID NO.: 667 | GGSGGGGSG |
| H10F7-M11VL | SEQ ID NO.: 668 | DIQMTQSPSSLSASVGDRVT |
| | | ITCRASSGIISYIDWFQQKP |
| | | GKAPKRLIYATFDLASGVPS |
| | | RFSGSGSGTDYTLTISSLQP |
| | | EDFATYYCRQVGSYPETFGQ |
| | | GTKLEIKR |
| CL | SEQ ID NO.: 669 | TVAAPSVFIFPPSDEQLKSG |
| | | TASVVCLLNNFYPREAKVQW |
| | | KVDNALQSGNSQESVTEQDS |
| | | KDSTYSLSSTLTLSKADYEK |
| | | HKVYACEVTHQGLSSPVTKS |
| | | FNRGEC |
| DVD HEAVY | SEQ ID NO.: 670 | EVQLVQSGAEVKKPGASVKV |
| VARIABLE | | SCKASGYTFANYGIIWVRQA |
| HMAK199-1-GS10- | | PGQGLEWMGWINTYTGKPTY |
| H10F7-M10 DVD | | AQKFQGRVTMTTDTSTSTAY |
| | | MELSSLRSEDTAVYYCARKL |
| | | FTTMDVTDNAMDYWGQGTTV |
| | | TVSSGGGGSGGGGSEVQLVQ |
| | | SGAEVKKPGSSVKVSCKASG |
| | | YTFDDYEIHWVRQAPGQGLE |
| | | WIGVNDPESGGTFYNQKFDG |
| | | RATLTADKSTSTAYMELSSL |
| | | RSEDTAVYYCTRYDKWDSFY |
| | | GMDYWGQGTTVTVSS |
| HMAK199-1Vh | SEQ ID NO.: 671 | EVQLVQSGAEVKKPGASVKV |
| | | SCKASGYTFANYGIIWVRQA |
| | | PGQGLEWMGWINTYTGKPTY |
| | | AQKFQGRVTMTTDTSTSTAY |
| | | MELSSLRSEDTAVYYCARKL |
| | | FTTMDVTDNAMDYWGQGTTV |
| | | TVSS |
| LINKER | SEQ ID NO.: 672 | GGGGSGGGGS |
| H10F7-M10 Vh | SEQ ID NO.: 673 | EVQLVQSGAEVKKPGSSVKV |
| | | SCKASGYTFDDYEIHWVRQA |
| | | PGQGLEWIGVNDPESGGTFY |
| | | NQKFDGRATLTADKSTSTAY |
| | | MELSSLRSEDTAVYYCTRYD |
| | | KWDSFYGMDYWGQGTTVTVS |
| | | S |
| CH CG1234, 235 | SEQ ID NO.: 674 | ASTKGPSVFPLAPSSKSTSG |
| MUT Z NONA | | GTAALGCLVKDYFPEPVTVS |
| | | WNSGALTSGVHTFPAVLQSS |
| | | GLYSLSSVVTVPSSSLGTQT |
| | | YICNVNHKPSNTKVDKKVEP |
| | | KSCDKTHTCPPCPAPEAAGG |
| | | PSVFLFPPKPKDTLMISRTP |
| | | EVTCVVVDVSHEDPEVKFNW |
| | | YVDGVEVHNAKTKPREEQYN |
| | | STYRVVSVLTVLHQDWLNGK |
| | | EYKCKVSNKALPAPIEKTIS |
| | | KAKGQPREPQVYTLPPSREE |
| | | MTKNQVSLTCLVKGFYPSDI |
| | | AVEWESNGQPENNYKTTPPV |
| | | LDSDGSFFLYSKLTVDKSRW |
| | | QQGNVFSCSVMHEALHNHYT |
| | | QKSLSLSPGK |
| DVD LIGHT | SEQ ID NO.: 675 | DIQMTQSPSSLSASVGDRVT |
| VARIABLE | | ITCRASQDISQYLNWYQQKP |
| HMAK199-1-GS10- | | GKAPKLLIYYTSRLQSGVPS |
| H10F7-M10DVD | | RFSGSGSGTDFTLTISSLQP |
| | | EDFATYFCQQGNTWPPTFGQ |
| | | GTKLEIKRGGSGGGGSGDIQ |
| | | MTQSPSSLSASVGDRVTITC |
| | | SASSGSISYIDWFQQKPGKA |
| | | PKRLIYATFELASGVPSRFS |
| | | GSGSGTDFTLTISSLQPEDF |
| | | ATYYCHQLGSYPDTFGQGTK |
| | | LEIKR |
| HMAK199-1 VL | SEQ ID NO.: 676 | DIQMTQSPSSLSASVGDRVT |
| | | ITCRASQDISQYLNWYQQKP |
| | | GKAPKLLIYYTSRLQSGVPS |
| | | RFSGSGSGTDFTLTISSLQP |
| | | EDFATYFCQQGNTWPPTFGQ |
| | | GTKLEIKR |
| LINKER | SEQ ID NO.: 677 | GGSGGGGSG |
| H10F7-M10VL | SEQ ID NO.: 678 | DIQMTQSPSSLSASVGDRVT |
| | | ITCSASSGSISYIDWFQQKP |
| | | GKAPKRLIYATFELASGVPS |
| | | RFSGSGSGTDFTLTISSLQP |
| | | EDFATYYCHQLGSYPDTFGQ |
| | | GTKLEIKR |
| CL | SEQ ID NO.: 679 | TVAAPSVFIFPPSDEQLKSG |
| | | TASVVCLLNNFYPREAKVQW |
| | | KVDNALQSGNSQESVTEQDS |
| | | KDSTYSLSSTLTLSKADYEK |
| | | HKVYACEVTHQGLSSPVTKS |
| | | FNRGEC |
| DVD HEAVY | SEQ ID NO.: 680 | EVQLVQSGAEVKKPGASVKV |
| VARIABLE | | SCKASGYTFNNYGIIWVRQA |
| HMAK199-10-GS10- | | PGQGLEWMGWINTYSGKPTY |
| H10F7-M11 DVD | | AQKFQGRVTMTTDTSTSTAY |
| | | MELSSLRSEDTAVYFCARKL |
| | | FTTMDVTDNAMDYWGQGTTV |
| | | TVSSGGGGSGGGGSEVQLVQ |
| | | SGAEVKKPGSSVKVSCKASG |
| | | YTFTDYEIHWVRQAPGQGLE |
| | | WMGVNDPESGGTFYNQKFDG |
| | | RVTLTADESTSTAYMELSSL |
| | | RSEDTAVYYCTRYSKWDSFD |
| | | GMDYWGQGTTVTVSS |
| HMAK199-10Vh | SEQ ID NO.: 681 | EVQLVQSGAEVKKPGASVKV |
| | | SCKASGYTFNNYGIIWVRQA |
| | | PGQGLEWMGWINTYSGKPTY |
| | | AQKFQGRVTMTTDTSTSTAY |
| | | MELSSLRSEDTAVYFCARKL |
| | | FTTMDVTDNAMDYWGQGTTV |
| | | TVSS |
| LINKER | SEQ ID NO.: 682 | GGGGSGGGGS |
| H10F7-M11 Vh | SEQ ID NO.: 683 | EVQLVQSGAEVKKPGSSVKV |
| | | SCKASGYTFTDYEIHWVRQA |
| | | PGQGLEWMGVNDPESGGTFY |
| | | NQKFDGRVTLTADESTSTAY |
| | | MELSSLRSEDTAVYYCTRYS |
| | | KWDSFDGMDYWGQGTTVTVS |
| | | S |
| CH CG1, 234, 235 | SEQ ID NO.: 684 | ASTKGPSVFPLAPSSKSTSG |
| MUT Z NONA | | GTAALGCLVKDYFPEPVTVS |
| | | WNSGALTSGVHTFPAVLQSS |
| | | GLYSLSSVVTVPSSSLGTQT |
| | | YICNVNHKPSNTKVDKKVEP |
| | | KSCDKTHTCPPCPAPEAAGG |
| | | PSVFLFPPKPKDTLMISRTP |
| | | EVTCVVVDVSHEDPEVKFNW |
| | | YVDGVEVHNAKTKPREEQYN |
| | | STYRVVSVLTVLHQDWLNGK |
| | | EYKCKVSNKALPAPIEKTIS |
| | | KAKGQPREPQVYTLPPSREE |
| | | MTKNQVSLTCLVKGFYPSDI |
| | | AVEWESNGQPENNYKTTPPV |
| | | LDSDGSFFLYSKLTVDKSRW |
| | | QQGNVFSCSVMHEALHNHYT |
| | | QKSLSLSPGK |
| DVD LIGHT | SEQ ID NO.: 685 | DIQMTQSPSSLSASVGDRVT |
| VARIABLE | | ITCRASQDISNFLNWYQQKP |
| HMAK199-10-GS10- | | GKAPKLLIYYTSRLQSGVPS |
| H10F7-M11DVD | | RFSGSGSGTDYTLTISSLQP |
| | | EDFATYFCQQGNTQPPTFGQ |
| | | GTKLEIKRGGSGGGGSGDIQ |
| | | MTQSPSSLSASVGDRVTITC |
| | | RASSGIISYIDWFQQKPGKA |
| | | PKRLIYATFDLASGVPSRFS |
| | | GSGSGTDYTLTISSLQPEDF |
| | | ATYYCRQVGSYPETFGQGTK |
| | | LEIKR |
| HMAK199-10 VL | SEQ ID NO.: 686 | DIQMTQSPSSLSASVGDRVT |
| | | ITCRASQDISNFLNWYQQKP |
| | | GKAPKLLIYYTSRLQSGVPS |
| | | RFSGSGSGTDYTLTISSLQP |
| | | EDFATYFCQQGNTQPPTFGQ |
| | | GTKLEIKR |
| LINKER | SEQ ID NO.: 687 | GGSGGGGSG |
| H10F7-M11VL | SEQ ID NO.: 688 | DIQMTQSPSSLSASVGDRVT |
| | | ITCRASSGIISYIDWFQQKP |
| | | GKAPKRLIYATFDLASGVPS |
| | | RFSGSGSGTDYTLTISSLQP |
| | | EDFATYYCRQVGSYPETFGQ |
| | | GTKLEIKR |
| CL | SEQ ID NO.: 689 | TVAAPSVFIFPPSDEQLKSG |
| | | TASVVCLLNNFYPREAKVQW |
| | | KVDNALQSGNSQESVTEQDS |
| | | KDSTYSLSSTLTLSKADYEK |
| | | HKVYACEVTHQGLSSPVTKS |
| | | FNRGEC |
| DVD HEAVY | SEQ ID NO.: 690 | EVQLVQSGAEVKKPGASVKV |
| VARIABLE | | SCKASGYTFNNYGIIWVRQA |
| HMAK199-10-GS10- | | PGQGLEWMGWINTYSGKPTY |
| H10F7-M10 DVD | | AQKFQGRVTMTTDTSTSTAY |
| | | MELSSLRSEDTAVYFCARKL |
| | | FTTMDVTDNAMDYWGQGTTV |
| | | TVSSGGGGSGGGGSEVQLVQ |
| | | SGAEVKKPGSSVKVSCKASG |
| | | YTFDDYEIHWVRQAPGQGLE |
| | | WIGVNDPESGGTFYNQKFDG |
| | | RATLTADKSTSTAYMELSSL |
| | | RSEDTAVYYCTRYDKWDSFY |
| | | GMDYWGQGTTVTVSS |
| HMAK199-10Vh | SEQ ID NO.: 691 | EVQLVQSGAEVKKPGASVKV |
| | | SCKASGYTFNNYGIIWVRQA |
| | | PGQGLEWMGWINTYSGKPTY |
| | | AQKFQGRVTMTTDTSTSTAY |
| | | MELSSLRSEDTAVYFCARKL |
| | | FTTMDVTDNAMDYWGQGTTV |
| | | TVSS |
| LINKER | SEQ ID NO.: 692 | GGGGSGGGGS |
| H10F7-M10 Vh | SEQ ID NO.: 693 | EVQLVQSGAEVKKPGSSVKV |
| | | SCKASGYTFDDYEIHWVRQA |
| | | PGQGLEWIGVNDPESGGTFY |
| | | NQKFDGRATLTADKSTSTAY |
| | | MELSSLRSEDTAVYYCTRYD |
| | | KWDSFYGMDYWGQGTTVTVS |
| | | S |
| CH CG1, 234, 235 | SEQ ID NO.: 694 | ASTKGPSVFPLAPSSKSTSG |
| MUT | | GTAALGCLVKDYFPEPVTVS |
| Z NONA | | WNSGALTSGVHTFPAVLQSS |
| | | GLYSLSSVVTVPSSSLGTQT |
| | | YICNVNHKPSNTKVDKKVEP |
| | | KSCDKTHTCPPCPAPEAAGG |
| | | PSVFLFPPKPKDTLMISRTP |
| | | EVTCVVVDVSHEDPEVKFNW |
| | | YVDGVEVHNAKTKPREEQYN |
| | | STYRVVSVLTVLHQDWLNGK |
| | | EYKCKVSNKALPAPIEKTIS |
| | | KAKGQPREPQVYTLPPSREE |
| | | MTKNQVSLTCLVKGFYPSDI |
| | | AVEWESNGQPENNYKTTPPV |
| | | LDSDGSFFLYSKLTVDKSRW |
| | | QQGNVFSCSVMHEALHNHYT |
| | | QKSLSLSPGK |
| DVD LIGHT | SEQ ID NO.: 695 | DIQMTQSPSSLSASVGDRVT |
| VARIABLE | | ITCRASQDISNFLNWYQQKP |
| HMAK199-10-GS10- | | GKAPKLLIYYTSRLQSGVPS |
| H10F7-M10DVD | | RFSGSGSGTDYTLTISSLQP |
| | | EDFATYFCQQGNTQPPTFGQ |
| | | GTKLEIKRGGSGGGGSGDIQ |
| | | MTQSPSSLSASVGDRVTITC |
| | | SASSGSISYIDWFQQKPGKA |
| | | PKRLIYATFELASGVPSRFS |
| | | GSGSGTDFTLTISSLQPEDF |
| | | ATYYCHQLGSYPDTFGQGTK |
| | | LEIKR |
| HMAK199-10 VL | SEQ ID NO.: 696 | DIQMTQSPSSLSASVGDRVT |
| | | ITCRASQDISNFLNWYQQKP |
| | | GKAPKLLIYYTSRLQSGVPS |
| | | RFSGSGSGTDYTLTISSLQP |
| | | EDFATYFCQQGNTQPPTFGQ |
| | | GTKLEIKR |
| LINKER | SEQ ID NO.: 697 | GGSGGGGSG |
| H10F7-M10VL | SEQ ID NO.: 698 | DIQMTQSPSSLSASVGDRVT |
| | | ITCSASSGSISYIDWFQQKP |
| | | GKAPKRLIYATFELASGVPS |
| | | RFSGSGSGTDFTLTISSLQP |
| | | EDFATYYCHQLGSYPDTFGQ |
| | | GTKLEIKR |
| CL | SEQ ID NO.: 699 | TVAAPSVFIFPPSDEQLKSG |
| | | TASVVCLLNNFYPREAKVQW |
| | | KVDNALQSGNSQESVTEQDS |
| | | KDSTYSLSSTLTLSKADYEK |
| | | HKVYACEVTHQGLSSPVTKS |
| | | FNRGEC |
| DVD HEAVY | SEQ ID NO.: 700 | EVQLVQSGAEVKKPGASVKV |
| VARIABLE | | SCKASGYTFNNYGINWVRQA |
| HMAK199-6-GS10- | | PGQGLEWMGWINTYTGKPTY |
| H10F7-M11 DVD | | AQKFQGRVTMTTDTSTSTAY |
| | | MELSSLRSEDTAVYFCARKF |
| | | RNTVAVTDYAMDYWGQGTTV |
| | | TVSSGGGGSGGGGSEVQLVQ |
| | | SGAEVKKPGSSVKVSCKASG |
| | | YTFTDYEIHWVRQAPGQGLE |
| | | WMGVNDPESGGTFYNQKFDG |
| | | RVTLTADESTSTAYMELSSL |
| | | RSEDTAVYYCTRYSKWDSFD |
| | | GMDYWGQGTTVTVSS |
| HMAK199-6Vh | SEQ ID NO.: 701 | EVQLVQSGAEVKKPGASVKV |
| | | SCKASGYTFNNYGINWVRQA |
| | | PGQGLEWMGWINTYTGKPTY |
| | | AQKFQGRVTMTTDTSTSTAY |
| | | MELSSLRSEDTAVYFCARKF |
| | | RNTVAVTDYAMDYWGQGTTV |
| | | TVSS |
| LINKER | SEQ ID NO.: 702 | GGGGSGGGGS |
| H10F7-M11 Vh | SEQ ID NO.: 703 | EVQLVQSGAEVKKPGSSVKV |
| | | SCKASGYTFTDYEIHWVRQA |
| | | PGQGLEWMGVNDPESGGTFY |
| | | NQKFDGRVTLTADESTSTAY |
| | | MELSSLRSEDTAVYYCTRYS |
| | | KWDSFDGMDYWGQGTTVTVS |
| | | S |
| CH CG1, | SEQ ID NO.: 704 | ASTKGPSVFPLAPSSKSTSG |
| 234, 235 MUT | | GTAALGCLVKDYFPEPVTVS |
| Z NONA | | WNSGALTSGVHTFPAVLQSS |
| | | GLYSLSSVVTVPSSSLGTQT |
| | | YICNVNHKPSNTKVDKKVEP |
| | | KSCDKTHTCPPCPAPEAAGG |
| | | PSVFLFPPKPKDTLMISRTP |
| | | EVTCVVVDVSHEDPEVKFNW |
| | | YVDGVEVHNAKTKPREEQYN |
| | | STYRVVSVLTVLHQDWLNGK |
| | | EYKCKVSNKALPAPIEKTIS |
| | | KAKGQPREPQVYTLPPSREE |
| | | MTKNQVSLTCLVKGFYPSDI |
| | | AVEWESNGQPENNYKTTPPV |
| | | LDSDGSFFLYSKLTVDKSRW |
| | | QQGNVFSCSVMHEALHNHYT |
| | | QKSLSLSPGK |
| DVD LIGHT | SEQ ID NO.: 705 | DIQMTQSPSSLSASVGDRVT |
| VARIABLE | | ITCRASQDIYDVLNWYQQKP |
| HMAK199-6-GS10- | | GKAPKLLIYYASRLQSGVPS |
| H10F7-M11DVD | | RFSGSGSGTDFTLTISSLQP |
| | | EDFATYYCQQGITLPPTFGQ |
| | | GTKLEIKRGGSGGGGSGDIQ |
| | | MTQSPSSLSASVGDRVTITC |
| | | RASSGIISYIDWFQQKPGKA |
| | | PKRLIYATFDLASGVPSRFS |
| | | GSGSGTDYTLTISSLQPEDF |
| | | ATYYCRQVGSYPETFGQGTK |
| | | LEIKR |
| HMAK199-6 VL | SEQ ID NO.: 706 | DIQMTQSPSSLSASVGDRVT |
| | | ITCRASQDIYDVLNWYQQKP |
| | | GKAPKLLIYYASRLQSGVPS |
| | | RFSGSGSGTDFTLTISSLQP |
| | | EDFATYYCQQGITLPPTFGQ |
| | | GTKLEIKR |
| LINKER | SEQ ID NO.: 707 | GGSGGGGSG |
| H10F7-M11VL | SEQ ID NO.: 708 | DIQMTQSPSSLSASVGDRVT |
| | | ITCRASSGIISYIDWFQQKP |
| | | GKAPKRLIYATFDLASGVPS |
| | | RFSGSGSGTDYTLTISSLQP |
| | | EDFATYYCRQVGSYPETFGQ |
| | | GTKLEIKR |
| CL | SEQ ID NO.: 709 | TVAAPSVFIFPPSDEQLKSG |
| | | TASVVCLLNNFYPREAKVQW |
| | | KVDNALQSGNSQESVTEQDS |
| | | KDSTYSLSSTLTLSKADYEK |
| | | HKVYACEVTHQGLSSPVTKS |
| | | FNRGEC |
| DVD HEAVY | SEQ ID NO.: 710 | EVQLVQSGAEVKKPGASVKV |
| VARIABLE | | SCKASGYTFNNYGINWVRQA |
| HMAK199-6-GS10- | | PGQGLEWMGWINTYTGKPTY |
| H10F7-M10 DVD | | AQKFQGRVTMTTDTSTSTAY |
| | | MELSSLRSEDTAVYFCARKF |
| | | RNTVAVTDYAMDYWGQGTTV |
| | | TVSSGGGGSGGGGSEVQLVQ |
| | | SGAEVKKPGSSVKVSCKASG |
| | | YTFDDYEIHWVRQAPGQGLE |
| | | WIGVNDPESGGTFYNQKFDG |
| | | RATLTADKSTSTAYMELSSL |
| | | RSEDTAVYYCTRYDKWDSFY |
| | | GMDYWGQGTTVTVSS |
| HMAK199-6Vh | SEQ ID NO.: 711 | EVQLVQSGAEVKKPGASVKV |
| | | SCKASGYTFNNYGINWVRQA |
| | | PGQGLEWMGWINTYTGKPTY |
| | | AQKFQGRVTMTTDTSTSTAY |
| | | MELSSLRSEDTAVYFCARKF |
| | | RNTVAVTDYAMDYWGQGTTV |
| | | TVSS |
| LINKER | SEQ ID NO.: 712 | GGGGSGGGGS |
| H10F7-M10 Vh | SEQ ID NO.: 713 | EVQLVQSGAEVKKPGSSVKV |
| | | SCKASGYTFDDYEIHWVRQA |
| | | PGQGLEWIGVNDPESGGTFY |
| | | NQKFDGRATLTADKSTSTAY |
| | | MELSSLRSEDTAVYYCTRYD |
| | | KWDSFYGMDYWGQGTTVTVS |
| | | S |
| CH CG1, 234, 235 | SEQ ID NO.: 714 | ASTKGPSVFPLAPSSKSTSG |
| MUT | | GTAALGCLVKDYFPEPVTVS |
| Z NONA | | WNSGALTSGVHTFPAVLQSS |
| | | GLYSLSSVVTVPSSSLGTQT |
| | | YICNVNHKPSNTKVDKKVEP |
| | | KSCDKTHTCPPCPAPEAAGG |
| | | PSVFLFPPKPKDTLMISRTP |
| | | EVTCVVVDVSHEDPEVKFNW |
| | | YVDGVEVHNAKTKPREEQYN |
| | | STYRVVSVLTVLHQDWLNGK |
| | | EYKCKVSNKALPAPIEKTIS |
| | | KAKGQPREPQVYTLPPSREE |
| | | MTKNQVSLTCLVKGFYPSDI |
| | | AVEWESNGQPENNYKTTPPV |
| | | LDSDGSFFLYSKLTVDKSRW |
| | | QQGNVFSCSVMHEALHNHYT |
| | | QKSLSLSPGK |
| DVD LIGHT | SEQ ID NO.: 715 | DIQMTQSPSSLSASVGDRVT |
| VARIABLE | | ITCRASQDIYDVLNWYQQKP |
| HMAK199-6-GS10- | | GKAPKLLIYYASRLQSGVPS |
| H10F7-M10 DVD | | RFSGSGSGTDFTLTISSLQP |
| | | EDFATYYCQQGITLPPTFGQ |
| | | GTKLEIKRGGSGGGGSGDIQ |
| | | MTQSPSSLSASVGDRVTITC |
| | | SASSGSISYIDWFQQKPGKA |
| | | PKRLIYATFELASGVPSRFS |
| | | GSGSGTDFTLTISSLQPEDF |
| | | ATYYCHQLGSYPDTFGQGTK |
| | | LEIKR |
| HMAK199-6 VL | SEQ ID NO.: 716 | DIQMTQSPSSLSASVGDRVT |
| | | ITCRASQDIYDVLNWYQQKP |
| | | GKAPKLLIYYASRLQSGVPS |
| | | RFSGSGSGTDFTLTISSLQP |
| | | EDFATYYCQQGITLPPTFGQ |
| | | GTKLEIKR |
| LINKER | SEQ ID NO.: 717 | GGSGGGGSG |
| H10F7-M10VL | SEQ ID NO.: 718 | DIQMTQSPSSLSASVGDRVT |
| | | ITCSASSGSISYIDWFQQKP |
| | | GKAPKRLIYATFELASGVPS |
| | | RFSGSGSGTDFTLTISSLQP |
| | | EDFATYYCHQLGSYPDTFGQ |
| | | GTKLEIKR |
| CL | SEQ ID NO.: 719 | TVAAPSVFIFPPSDEQLKSG |
| | | TASVVCLLNNFYPREAKVQW |
| | | KVDNALQSGNSQESVTEQDS |
| | | KDSTYSLSSTLTLSKADYEK |
| | | HKVYACEVTHQGLSSPVTKS |
| | | FNRGEC |
| DVD HEAVY | SEQ ID NO.: 720 | EVQLVQSGAEVKKPGASVKV |
| VARIABLE | | SCKASGYTFNNYGIIWVRQA |
| HMAK199-4-GS10- | | PGQGLEWMGWINTYTGKPTY |
| H10F7-M11 DVD | | AQKFQGRVTMTTDTSTSTAY |
| | | MELSSLRSEDTAVYYCARKL |
| | | FNTVAVTDNAMDYWGQGTTV |
| | | TVSSGGGGSGGGGSEVQLVQ |
| | | SGAEVKKPGSSVKVSCKASG |
| | | YTFTDYEIHWVRQAPGQGLE |
| | | WMGVNDPESGGTFYNQKFDG |
| | | RVTLTADESTSTAYMELSSL |
| | | RSEDTAVYYCTRYSKWDSFD |
| | | GMDYWGQGTTVTVSS |
| HMAK199-4Vh | SEQ ID NO.: 721 | EVQLVQSGAEVKKPGASVKV |
| | | SCKASGYTFNNYGIIWVRQA |
| | | PGQGLEWMGWINTYTGKPTY |
| | | AQKFQGRVTMTTDTSTSTAY |
| | | MELSSLRSEDTAVYYCARKL |
| | | FNTVAVTDNAMDYWGQGTTV |
| | | TVSS |
| LINKER | SEQ ID NO.: 722 | GGGGSGGGGS |
| H10F7-M11Vh | SEQ ID NO.: 723 | EVQLVQSGAEVKKPGSSVKV |
| | | SCKASGYTFTDYEIHWVRQA |
| | | PGQGLEWMGVNDPESGGTFY |
| | | NQKFDGRVTLTADESTSTAY |
| | | MELSSLRSEDTAVYYCTRYS |
| | | KWDSFDGMDYWGQGTTVTVS |
| | | S |
| CH CG1, 234, 235 | SEQ ID NO.: 724 | ASTKGPSVFPLAPSSKSTSG |
| MUT Z NONA | | GTAALGCLVKDYFPEPVTVS |
| | | WNSGALTSGVHTFPAVLQSS |
| | | GLYSLSSVVTVPSSSLGTQT |
| | | YICNVNHKPSNTKVDKKVEP |
| | | KSCDKTHTCPPCPAPEAAGG |
| | | PSVFLFPPKPKDTLMISRTP |
| | | EVTCVVVDVSHEDPEVKFNW |
| | | YVDGVEVHNAKTKPREEQYN |
| | | STYRVVSVLTVLHQDWLNGK |
| | | EYKCKVSNKALPAPIEKTIS |
| | | KAKGQPREPQVYTLPPSREE |
| | | MTKNQVSLTCLVKGFYPSDI |
| | | AVEWESNGQPENNYKTTPPV |
| | | LDSDGSFFLYSKLTVDKSRW |
| | | QQGNVFSCSVMHEALHNHYT |
| | | QKSLSLSPGK |
| DVD LIGHT | SEQ ID NO.: 725 | DIQMTQSPSSLSASVGDRVT |
| VARIABLE | | ITCRASQDIENYLNWYQQKP |
| HMAK199-4-GS10- | | GKAPKLLIYYTSRLQSGVPS |
| H10F7-M11 DVD | | RFSGSGSGTDFTLTISSLQP |
| | | EDFATYFCQQGNTQPPTFGQ |
| | | GTKLEIKRGGSGGGGSGDIQ |
| | | MTQSPSSLSASVGDRVTITC |
| | | RASSGIISYIDWFQQKPGKA |
| | | PKRLIYATFDLASGVPSRFS |
| | | GSGSGTDYTLTISSLQPEDF |
| | | ATYYCRQVGSYPETFGQGTK |
| | | LEIKR |
| HMAK199-4 VL | SEQ ID NO.: 726 | DIQMTQSPSSLSASVGDRVT |
| | | ITCRASQDIENYLNWYQQKP |
| | | GKAPKLLIYYTSRLQSGVPS |
| | | RFSGSGSGTDFTLTISSLQP |
| | | EDFATYFCQQGNTQPPTFGQ |
| | | GTKLEIKR |
| LINKER | SEQ ID NO.: 727 | GGSGGGGSG |
| H10F7-M11VL | SEQ ID NO.: 728 | DIQMTQSPSSLSASVGDRVT |
| | | ITCRASSGIISYIDWFQQKP |
| | | GKAPKRLIYATFDLASGVPS |
| | | RFSGSGSGTDYTLTISSLQP |
| | | EDFATYYCRQVGSYPETFGQ |
| | | GTKLEIKR |
| CL | SEQ ID NO.: 729 | TVAAPSVFIFPPSDEQLKSG |
| | | TASVVCLLNNFYPREAKVQW |
| | | KVDNALQSGNSQESVTEQDS |
| | | KDSTYSLSSTLTLSKADYEK |
| | | HKVYACEVTHQGLSSPVTKS |
| | | FNRGEC |
| DVD HEAVY | SEQ ID NO.: 730 | EVQLVESGGGLVQPGGSLRL |
| VARIABLE | | SCAASGFTFSNYGVEWVRQA |
| HMAK195-24-SS- | | PGKGLEWVSGIWADGSTHYA |
| H10F7-M11 DVD | | DTVKSRFTISRDNSKNTLYL |
| | | QMNSLRAEDTAVYYCAREWQ |
| | | HGPVAYWGQGTLVTVSSAST |
| | | KGPEVQLVQSGAEVKKPGSS |
| | | VKVSCKASGYTFTDYEIHWV |
| | | RQAPGQGLEWMGVNDPESGG |
| | | TFYNQKFDGRVTLTADESTS |
| | | TAYMELSSLRSEDTAVYYCT |
| | | RYSKWDSFDGMDYWGQGTTV |
| | | TVSS |
| HMAK195-24 Vh | SEQ ID NO.: 731 | EVQLVESGGGLVQPGGSLRL |
| | | SCAASGFTFSNYGVEWVRQA |
| | | PGKGLEWVSGIWADGSTHYA |
| | | DTVKSRFTISRDNSKNTLYL |
| | | QMNSLRAEDTAVYYCAREWQ |
| | | HGPVAYWGQGTLVTVSS |
| LINKER | SEQ ID NO.: 732 | ASTKGP |
| H10F7-M11 Vh | SEQ ID NO.: 733 | EVQLVQSGAEVKKPGSSVKV |
| | | SCKASGYTFTDYEIHWVRQA |
| | | PGQGLEWMGVNDPESGGTFY |
| | | NQKFDGRVTLTADESTSTAY |
| | | MELSSLRSEDTAVYYCTRYS |
| | | KWDSFDGMDYWGQGTTVTVS |
| | | S |
| CH CG1 Z NONA | SEQ ID NO.: 734 | ASTKGPSVFPLAPSSKSTSG |
| | | GTAALGCLVKDYFPEPVTVS |
| | | WNSGALTSGVHTFPAVLQSS |
| | | GLYSLSSVVTVPSSSLGTQT |
| | | YICNVNHKPSNTKVDKKVEP |
| | | KSCDKTHTCPPCPAPELLGG |
| | | PSVFLFPPKPKDTLMISRTP |
| | | EVTCVVVDVSHEDPEVKFNW |
| | | YVDGVEVHNAKTKPREEQYN |
| | | STYRVVSVLTVLHQDWLNGK |
| | | EYKCKVSNKALPAPIEKTIS |
| | | KAKGQPREPQVYTLPPSREE |
| | | MTKNQVSLTCLVKGFYPSDI |
| | | AVEWESNGQPENNYKTTPPV |
| | | LDSDGSFFLYSKLTVDKSRW |
| | | QQGNVFSCSVMHEALHNHYT |
| | | QKSLSLSPGK |
| DVD LIGHT | SEQ ID NO.: 735 | DIQMTQSPSSLSASVGDRVT |
| VARIABLE | | ITCKASQLVSSAVAWYQQKP |
| HMAK195-24-SS- | | GKAPKLLIYWASTLHTGVPS |
| H10F7-M11DVD | | RFSGSGSGTDFTLTISSLQP |
| | | EDFATYYCQQHYRTPFTFGQ |
| | | GTKLEIKRTVAAPDIQMTQS |
| | | PSSLSASVGDRVTITCRASS |
| | | GIISYIDWFQQKPGKAPKRL |
| | | IYATFDLASGVPSRFSGSGS |
| | | GTDYTLTISSLQPEDFATYY |
| | | CRQVGSYPETFGQGTKLEIK |
| | | R |
| HMAK195-24 VL | SEQ ID NO.: 736 | DIQMTQSPSSLSASVGDRVT |
| | | ITCKASQLVSSAVAWYQQKP |
| | | GKAPKLLIYWASTLHTGVPS |
| | | RFSGSGSGTDFTLTISSLQP |
| | | EDFATYYCQQHYRTPFTFGQ |
| | | GTKLEIKR |
| LINKER | SEQ ID NO.: 737 | TVAAP |
| H10F7-M11VL | SEQ ID NO.: 738 | DIQMTQSPSSLSASVGDRVT |
| | | ITCRASSGIISYIDWFQQKP |
| | | GKAPKRLIYATFDLASGVPS |
| | | RFSGSGSGTDYTLTISSLQP |
| | | EDFATYYCRQVGSYPETFGQ |
| | | GTKLEIKR |
| CL | SEQ ID NO.: 739 | TVAAPSVFIFPPSDEQLKSG |
| | | TASVVCLLNNFYPREAKVQW |
| | | KVDNALQSGNSQESVTEQDS |
| | | KDSTYSLSSTLTLSKADYEK |
| | | HKVYACEVTHQGLSSPVTKS |
| | | FNRGEC |
| DVD HEAVY | SEQ ID NO.: 740 | EVQLVQSGAEVKKPGASVKV |
| VARIABLE | | SCKASGYTFNNYGIIWVRQA |
| HMAK199-4-SS- | | PGQGLEWMGWINTYTGKPTY |
| H10F7-M11 DVD | | AQKFQGRVTMTTDTSTSTAY |
| | | MELSSLRSEDTAVYYCARKL |
| | | FNTVAVTDNAMDYWGQGTTV |
| | | TVSSASTKGPEVQLVQSGAE |
| | | VKKPGSSVKVSCKASGYTFT |
| | | DYEIHWVRQAPGQGLEWMGV |
| | | NDPESGGTFYNQKFDGRVTL |
| | | TADESTSTAYMELSSLRSED |
| | | TAVYYCTRYSKWDSFDGMDY |
| | | WGQGTTVTVSS |
| HMAK199-4 Vh | SEQ ID NO.: 741 | EVQLVQSGAEVKKPGASVKV |
| | | SCKASGYTFNNYGIIWVRQA |
| | | PGQGLEWMGWINTYTGKPTY |
| | | AQKFQGRVTMTTDTSTSTAY |
| | | MELSSLRSEDTAVYYCARKL |
| | | FNTVAVTDNAMDYWGQGTTV |
| | | TVSS |
| LINKER | SEQ ID NO.: 742 | ASTKGP |
| H10F7-M11 Vh | SEQ ID NO.: 743 | EVQLVQSGAEVKKPGSSVKV |
| | | SCKASGYTFTDYEIHWVRQA |
| | | PGQGLEWMGVNDPESGGTFY |
| | | NQKFDGRVTLTADESTSTAY |
| | | MELSSLRSEDTAVYYCTRYS |
| | | KWDSFDGMDYWGQGTTVTVS |
| | | S |
| CH CG1 Z NONA | SEQ ID NO.: 744 | ASTKGPSVFPLAPSSKSTSG |
| | | GTAALGCLVKDYFPEPVTVS |
| | | WNSGALTSGVHTFPAVLQSS |
| | | GLYSLSSVVTVPSSSLGTQT |
| | | YICNVNHKPSNTKVDKKVEP |
| | | KSCDKTHTCPPCPAPELLGG |
| | | PSVFLFPPKPKDTLMISRTP |
| | | EVTCVVVDVSHEDPEVKFNW |
| | | YVDGVEVHNAKTKPREEQYN |
| | | STYRVVSVLTVLHQDWLNGK |
| | | EYKCKVSNKALPAPIEKTIS |
| | | KAKGQPREPQVYTLPPSREE |
| | | MTKNQVSLTCLVKGFYPSDI |
| | | AVEWESNGQPENNYKTTPPV |
| | | LDSDGSFFLYSKLTVDKSRW |
| | | QQGNVFSCSVMHEALHNHYT |
| | | QKSLSLSPGK |
| DVD LIGHT | SEQ ID NO.: 745 | DIQMTQSPSSLSASVGDRVT |
| VARIABLE | | ITCRASQDIENYLNWYQQKP |
| HMAK199-4-SS- | | GKAPKLLIYYTSRLQSGVPS |
| H10F7-M11DVD | | RFSGSGSGTDFTLTISSLQP |
| | | EDFATYFCQQGNTQPPTFGQ |
| | | GTKLEIKRTVAAPDIQMTQS |
| | | PSSLSASVGDRVTITCRASS |
| | | GIISYIDWFQQKPGKAPKRL |
| | | IYATFDLASGVPSRFSGSGS |
| | | GTDYTLTISSLQPEDFATYY |
| | | CRQVGSYPETFGQGTKLEIK |
| | | R |
| HMAK199-4 VL | SEQ ID NO.: 746 | DIQMTQSPSSLSASVGDRVT |
| | | ITCRASQDIENYLNWYQQKP |
| | | GKAPKLLIYYTSRLQSGVPS |
| | | RFSGSGSGTDFTLTISSLQP |
| | | EDFATYFCQQGNTQPPTFGQ |
| | | GTKLEIKR |
| LINKER | SEQ ID NO.: 747 | GGSGGGGSG |
| H10F7-M11VL | SEQ ID NO.: 748 | DIQMTQSPSSLSASVGDRVT |
| | | ITCRASSGIISYIDWFQQKP |
| | | GKAPKRLIYATFDLASGVPS |
| | | RFSGSGSGTDYTLTISSLQP |
| | | EDFATYYCRQVGSYPETFGQ |
| | | GTKLEIKR |
| CL | SEQ ID NO.: 749 | TVAAPSVFIFPPSDEQLKSG |
| | | TASVVCLLNNFYPREAKVQW |
| | | KVDNALQSGNSQESVTEQDS |
| | | KDSTYSLSSTLTLSKADYEK |
| | | HKVYACEVTHQGLSSPVTKS |
| | | FNRGEC |
| DVD HEAVY | SEQ ID NO.: 750 | EVQLVQSGAEVKKPGSSVKV |
| VARIABLE | | SCKASGYTFTDYEIHWVRQA |
| H10F7-M11- | | PGQGLEWMGVNDPESGGTFY |
| HMAK199-4.4 DVD | | NQKFDGRVTLTADESTSTAY |
| | | MELSSLRSEDTAVYYCTRYS |
| | | KWDSFDGMDYWGQGTTVTVS |
| | | SASTKGPEVQLVQSGAEVKK |
| | | PGASVKVSCKASGYTFNNYG |
| | | IIWVRQAPGQGLEWMGWINT |
| | | YTGKPTYAQKFQGRVTMTTD |
| | | TSTSTAYMELSSLRSEDTAV |
| | | YYCARKLFNTVAVTDNAMDY |
| | | WGQGTTVTVSS |
| H10F7-M11 Vh | SEQ ID NO.: 751 | EVQLVQSGAEVKKPGSSVKV |
| | | SCKASGYTFTDYEIHWVRQA |
| | | PGQGLEWMGVNDPESGGTFY |
| | | NQKFDGRVTLTADESTSTAY |
| | | MELSSLRSEDTAVYYCTRYS |
| | | KWDSFDGMDYWGQGTTVTVS |
| | | S |
| LINKER | SEQ ID NO.: 752 | ASTKGP |
| HMAK199-4 Vh | SEQ ID NO.: 753 | EVQLVQSGAEVKKPGASVKV |
| | | SCKASGYTFNNYGIIWVRQA |
| | | PGQGLEWMGWINTYTGKPTY |
| | | AQKFQGRVTMTTDTSTSTAY |
| | | MELSSLRSEDTAVYYCARKL |
| | | FNTVAVTDNAMDYWGQGTTV |
| | | TVSS |
| CH CG1 Z NONA | SEQ ID NO.: 754 | ASTKGPSVFPLAPSSKSTSG |
| | | GTAALGCLVKDYFPEPVTVS |
| | | WNSGALTSGVHTFPAVLQSS |
| | | GLYSLSSVVTVPSSSLGTQT |
| | | YICNVNHKPSNTKVDKKVEP |
| | | KSCDKTHTCPPCPAPELLGG |
| | | PSVFLFPPKPKDTLMISRTP |
| | | EVTCVVVDVSHEDPEVKFNW |
| | | YVDGVEVHNAKTKPREEQYN |
| | | STYRVVSVLTVLHQDWLNGK |
| | | EYKCKVSNKALPAPIEKTIS |
| | | KAKGQPREPQVYTLPPSREE |
| | | MTKNQVSLTCLVKGFYPSDI |
| | | AVEWESNGQPENNYKTTPPV |
| | | LDSDGSFFLYSKLTVDKSRW |
| | | QQGNVFSCSVMHEALHNHYT |
| | | QKSLSLSPGK |
| DVD LIGHT | SEQ ID NO.: 755 | DIQMTQSPSSLSASVGDRVT |
| VARIABLE | | ITCRASSGIISYIDWFQQKP |
| H10F7-M11- | | GKAPKRLIYATFDLASGVPS |
| HMAK199-4.4 DVD | | RFSGSGSGTDYTLTISSLQP |
| | | EDFATYYCRQVGSYPETFGQ |
| | | GTKLEIKRTVAAPDIQMTQS |
| | | PSSLSASVGDRVTITCRASQ |
| | | DIENYLNWYQQKPGKAPKLL |
| | | IYYTSRLQSGVPSRFSGSGS |
| | | GTDFTLTISSLQPEDFATYF |
| | | CQQGNTQPPTFGQGTKLEIK |
| | | R |
| H10F7-M11 VL | SEQ ID NO.: 756 | DIQMTQSPSSLSASVGDRVT |
| | | ITCRASQDIENYLNWYQQKP |
| | | GKAPKLLIYYTSRLQSGVPS |
| | | RFSGSGSGTDFTLTISSLQP |
| | | EDFATYFCQQGNTQPPTFGQ |
| | | GTKLEIKR |
| LINKER | SEQ ID NO.: 757 | TVAAP |
| HMAK199-4 VL | SEQ ID NO.: 758 | DIQMTQSPSSLSASVGDRVT |
| | | ITCRASQDIENYLNWYQQKP |
| | | GKAPKLLIYYTSRLQSGVPS |
| | | RFSGSGSGTDFTLTISSLQP |
| | | EDFATYFCQQGNTQPPTFGQ |
| | | GTKLEIKR |
| CL | SEQ ID NO.: 759 | TVAAPSVFIFPPSDEQLKSG |
| | | TASVVCLLNNFYPREAKVQW |
| | | KVDNALQSGNSQESVTEQDS |
| | | KDSTYSLSSTLTLSKADYEK |
| | | HKVYACEVTHQGLSSPVTKS |
| | | FNRGEC |
| DVD HEAVY | SEQ ID NO.: 760 | EVQLVQSGAEVKKPGSSVKV |
| VARIABLE | | SCKASGYTFTDYEIHWVRQA |
| H10F7-M11- | | PGQGLEWMGVNDPESGGTFY |
| HMAK199-4.8 DVD | | NQKFDGRVTLTADESTSTAY |
| | | MELSSLRSEDTAVYYCTRYS |
| | | KWDSFDGMDYWGQGTTVTVS |
| | | SGGGGSGGGGSEVQLVQSGA |
| | | EVKKPGASVKVSCKASGYTF |
| | | NNYGIIWVRQAPGQGLEWMG |
| | | WINTYTGKPTYAQKFQGRVT |
| | | MTTDTSTSTAYMELSSLRSE |
| | | DTAVYYCARKLFNTVAVTDN |
| | | AMDYWGQGTTVTVSS |
| H10F7-M11 Vh | SEQ ID NO.: 761 | EVQLVQSGAEVKKPGSSVKV |
| | | SCKASGYTFTDYEIHWVRQA |
| | | PGQGLEWMGVNDPESGGTFY |
| | | NQKFDGRVTLTADESTSTAY |
| | | MELSSLRSEDTAVYYCTRYS |
| | | KWDSFDGMDYWGQGTTVTVS |
| | | S |
| LINKER | SEQ ID NO.: 762 | GGGGSGGGGS |
| HMAK199-4 Vh | SEQ ID NO.: 763 | EVQLVQSGAEVKKPGASVKV |
| | | SCKASGYTFNNYGIIWVRQA |
| | | PGQGLEWMGWINTYTGKPTY |
| | | AQKFQGRVTMTTDTSTSTAY |
| | | MELSSLRSEDTAVYYCARKL |
| | | FNTVAVTDNAMDYWGQGTTV |
| | | TVSS |
| CH CG1 Z NONA | SEQ ID NO.: 764 | ASTKGPSVFPLAPSSKSTSG |
| | | GTAALGCLVKDYFPEPVTVS |
| | | WNSGALTSGVHTFPAVLQSS |
| | | GLYSLSSVVTVPSSSLGTQT |
| | | YICNVNHKPSNTKVDKKVEP |
| | | KSCDKTHTCPPCPAPELLGG |
| | | PSVFLFPPKPKDTLMISRTP |
| | | EVTCVVVDVSHEDPEVKFNW |
| | | YVDGVEVHNAKTKPREEQYN |
| | | STYRVVSVLTVLHQDWLNGK |
| | | EYKCKVSNKALPAPIEKTIS |
| | | KAKGQPREPQVYTLPPSREE |
| | | MTKNQVSLTCLVKGFYPSDI |
| | | AVEWESNGQPENNYKTTPPV |
| | | LDSDGSFFLYSKLTVDKSRW |
| | | QQGNVFSCSVMHEALHNHYT |
| | | QKSLSLSPGK |
| DVD LIGHT | SEQ ID NO.: 765 | DIQMTQSPSSLSASVGDRVT |
| VARIABLE | | ITCRASSGIISYIDWFQQKP |
| H10F7-M11- | | GKAPKRLIYATFDLASGVPS |
| HMAK199-4.8 DVD | | RFSGSGSGTDYTLTISSLQP |
| | | EDFATYYCRQVGSYPETFGQ |
| | | GTKLEIKRGGSGGGGSGDIQ |
| | | MTQSPSSLSASVGDRVTITC |
| | | RASQDIENYLNWYQQKPGKA |
| | | PKLLIYYTSRLQSGVPSRFS |
| | | GSGSGTDFTLTISSLQPEDF |
| | | ATYFCQQGNTQPPTFGQGTK |
| | | LEIKR |
| H10F7-M11 VL | SEQ ID NO.: 766 | DIQMTQSPSSLSASVGDRVT |
| | | ITCRASSGIISYIDWFQQKP |
| | | GKAPKRLIYATFDLASGVPS |
| | | RFSGSGSGTDYTLTISSLQP |
| | | EDFATYYCRQVGSYPETFGQ |
| | | GTKLEIKR |
| LINKER | SEQ ID NO.: 767 | GGSGGGGSG |
| H HMAK199- | SEQ ID NO.: 768 | DIQMTQSPSSLSASVGDRVT |
| 4VL | | ITCRASQDIENYLNWYQQKP |
| | | GKAPKLLIYYTSRLQSGVPS |
| | | RFSGSGSGTDFTLTISSLQP |
| | | EDFATYFCQQGNTQPPTFGQ |
| | | GTKLEIKR |
| CL | SEQ ID NO.: 769 | TVAAPSVFIFPPSDEQLKSG |
| | | TASVVCLLNNFYPREAKVQW |
| | | KVDNALQSGNSQESVTEQDS |
| | | KDSTYSLSSTLTLSKADYEK |
| | | HKVYACEVTHQGLSSPVTKS |
| | | FNRGEC |
| DVD HEAVY | SEQ ID NO.: 770 | EVQLVQSGAEVKKPGASVKV |
| VARIABLE | | SCKASGYTFANYGIIWVRQA |
| HMAK199-1-h10F7- | | PGQGLEWMGWINTYTGKPTY |
| M11.8 QL DVD | | AQKFQGRVTMTTDTSTSTAY |
| | | MELSSLRSEDTAVYYCARKL |
| | | FTTMDVTDNAMDYWGQGTTV |
| | | TVSSGGGGSGGGGSEVQLVQ |
| | | SGAEVKKPGSSVKVSCKASG |
| | | YTFTDYEIHWVRQAPGQGLE |
| | | WMGVNDPESGGTFYNQKFDG |
| | | RVTLTADESTSTAYMELSSL |
| | | RSEDTAVYYCTRYSKWDSFD |
| | | GMDYWGQGTTVTVSS |
| HMAK199-1 Vh | SEQ ID NO.: 771 | EVQLVQSGAEVKKPGASVKV |
| | | SCKASGYTFANYGIIWVRQA |
| | | PGQGLEWMGWINTYTGKPTY |
| | | AQKFQGRVTMTTDTSTSTAY |
| | | MELSSLRSEDTAVYYCARKL |
| | | FTTMDVTDNAMDYWGQGTTV |
| | | TVSS |
| LINKER | SEQ ID NO.: 772 | GGGGSGGGGS |
| H10F7-M11 Vh | SEQ ID NO.: 773 | EVQLVQSGAEVKKPGSSVKV |
| | | SCKASGYTFTDYEIHWVRQA |
| | | PGQGLEWMGVNDPESGGTFY |
| | | NQKFDGRVTLTADESTSTAY |
| | | MELSSLRSEDTAVYYCTRYS |
| | | KWDSFDGMDYWGQGTTVTVS |
| | | S |
| CH CG1 (234, 235) | SEQ ID NO.: 774 | ASTKGPSVFPLAPSSKSTSG |
| MUT, QL, Z | | GTAALGCLVKDYFPEPVTVS |
| NONA | | WNSGALTSGVHTFPAVLQSS |
| | | GLYSLSSVVTVPSSSLGTQT |
| | | YICNVNHKPSNTKVDKKVEP |
| | | KSCDKTHTCPPCPAPEAAGG |
| | | PSVFLFPPKPKDQLMISRTP |
| | | EVTCVVVDVSHEDPEVKFNW |
| | | YVDGVEVHNAKTKPREEQYN |
| | | STYRVVSVLTVLHQDWLNGK |
| | | EYKCKVSNKALPAPIEKTIS |
| | | KAKGQPREPQVYTLPPSREE |
| | | MTKNQVSLTCLVKGFYPSDI |
| | | AVEWESNGQPENNYKTTPPV |
| | | LDSDGSFFLYSKLTVDKSRW |
| | | QQGNVFSCSVLHEALHNHYT |
| | | QKSLSLSPGK |
| DVD HEAVY | SEQ ID NO.: 775 | EVQLVQSGAEVKKPGASVKV |
| VARIABLE | | SCKASGYTFANYGIIWVRQA |
| HMAK199-1-h10F7- | | PGQGLEWMGWINTYTGKPTY |
| M11.8 YTE DVD | | AQKFQGRVTMTTDTSTSTAY |
| | | MELSSLRSEDTAVYYCARKL |
| | | FTTMDVTDNAMDYWGQGTTV |
| | | TVSSGGGGSGGGGSEVQLVQ |
| | | SGAEVKKPGSSVKVSCKASG |
| | | YTFTDYEIHWVRQAPGQGLE |
| | | WMGVNDPESGGTFYNQKFDG |
| | | RVTLTADESTSTAYMELSSL |
| | | RSEDTAVYYCTRYSKWDSFD |
| | | GMDYWGQGTTVTVSS |
| HMAK199-1 Vh | SEQ ID NO.: 776 | EVQLVQSGAEVKKPGASVKV |
| | | SCKASGYTFANYGIIWVRQA |
| | | PGQGLEWMGWINTYTGKPTY |
| | | AQKFQGRVTMTTDTSTSTAY |
| | | MELSSLRSEDTAVYYCARKL |
| | | FTTMDVTDNAMDYWGQGTTV |
| | | TVSS |
| LINKER | SEQ ID NO.: 777 | GGGGSGGGGS |
| H10F7-M11 Vh | SEQ ID NO.: 778 | EVQLVQSGAEVKKPGSSVKV |
| | | SCKASGYTFTDYEIHWVRQA |
| | | PGQGLEWMGVNDPESGGTFY |
| | | NQKFDGRVTLTADESTSTAY |
| | | MELSSLRSEDTAVYYCTRYS |
| | | KWDSFDGMDYWGQGTTVTVS |
| | | S |
| CH CG1 (234, 235) | SEQ ID NO.: 779 | ASTKGPSVFPLAPSSKSTSG |
| MUT, YTE, Z | | GTAALGCLVKDYFPEPVTVS |
| NONA | | WNSGALTSGVHTFPAVLQSS |
| | | GLYSLSSVVTVPSSSLGTQT |
| | | YICNVNHKPSNTKVDKKVEP |
| | | KSCDKTHTCPPCPAPEAAGG |
| | | PSVFLFPPKPKDTLYITREP |
| | | EVTCVVVDVSHEDPEVKFNW |
| | | YVDGVEVHNAKTKPREEQYN |
| | | STYRVVSVLTVLHQDWLNGK |
| | | EYKCKVSNKALPAPIEKTIS |
| | | KAKGQPREPQVYTLPPSREE |
| | | MTKNQVSLTCLVKGFYPSDI |
| | | AVEWESNGQPENNYKTTPPV |
| | | LDSDGSFFLYSKLTVDKSRW |
| | | QQGNVFSCSVMHEALHNHYT |
| | | QKSLSLSPGK |
| DVD HEAVY | SEQ ID NO.: 780 | EVQLVQSGAEVKKPGASVKV |
| VARIABLE | | SCKASGYTFANYGIIWVRQA |
| HMAK199-1-h10F7- | | PGQGLEWMGWINTYTGKPTY |
| M10.8 QL DVD | | AQKFQGRVTMTTDTSTSTAY |
| | | MELSSLRSEDTAVYYCARKL |
| | | FTTMDVTDNAMDYWGQGTTV |
| | | TVSSGGGGSGGGGSEVQLVQ |
| | | SGAEVKKPGSSVKVSCKASG |
| | | YTFDDYEIHWVRQAPGQGLE |
| | | WIGVNDPESGGTFYNQKFDG |
| | | RATLTADKSTSTAYMELSSL |
| | | RSEDTAVYYCTRYDKWDSFY |
| | | GMDYWGQGTTVTVSS |
| HMAK199-1 Vh | SEQ ID NO.: 781 | EVQLVQSGAEVKKPGASVKV |
| | | SCKASGYTFANYGIIWVRQA |
| | | PGQGLEWMGWINTYTGKPTY |
| | | AQKFQGRVTMTTDTSTSTAY |
| | | MELSSLRSEDTAVYYCARKL |
| | | FTTMDVTDNAMDYWGQGTTV |
| | | TVSS |
| LINKER | SEQ ID NO.: 782 | GGGGSGGGGS |
| H10F7-M11 Vh | SEQ ID NO.: 783 | EVQLVQSGAEVKKPGSSVKV |
| | | SCKASGYTFDDYEIHWVRQA |
| | | PGQGLEWIGVNDPESGGTFY |
| | | NQKFDGRATLTADKSTSTAY |
| | | MELSSLRSEDTAVYYCTRYD |
| | | KWDSFYGMDYWGQGTTVTVS |
| | | S |
| CH CG1 (234, 235) | SEQ ID NO.: 784 | ASTKGPSVFPLAPSSKSTSG |
| MUT, QL, Z | | GTAALGCLVKDYFPEPVTVS |
| NONA | | WNSGALTSGVHTFPAVLQSS |
| | | GLYSLSSVVTVPSSSLGTQT |
| | | YICNVNHKPSNTKVDKKVEP |
| | | KSCDKTHTCPPCPAPEAAGG |
| | | PSVFLFPPKPKDQLMISRTP |
| | | EVTCVVVDVSHEDPEVKFNW |
| | | YVDGVEVHNAKTKPREEQYN |
| | | STYRVVSVLTVLHQDWLNGK |
| | | EYKCKVSNKALPAPIEKTIS |
| | | KAKGQPREPQVYTLPPSREE |
| | | MTKNQVSLTCLVKGFYPSDI |
| | | AVEWESNGQPENNYKTTPPV |
| | | LDSDGSFFLYSKLTVDKSRW |
| | | QQGNVFSCSVLHEALHNHYT |
| | | QKSLSLSPGK |
| DVD HEAVY | SEQ ID NO.: 785 | EVQLVQSGAEVKKPGASVKV |
| VARIABLE | | SCKASGYTFANYGIIWVRQA |
| HMAK199-1-h10F7- | | PGQGLEWMGWINTYTGKPTY |
| M11.8 HC DVD wt | | AQKFQGRVTMTTDTSTSTAY |
| | | MELSSLRSEDTAVYYCARKL |
| | | FTTMDVTDNAMDYWGQGTTV |
| | | TVSSGGGGSGGGGSEVQLVQ |
| | | SGAEVKKPGSSVKVSCKASG |
| | | YTFTDYEIHWVRQAPGQGLE |
| | | WMGVNDPESGGTFYNQKFDG |
| | | RVTLTADESTSTAYMELSSL |
| | | RSEDTAVYYCTRYSKWDSFD |
| | | GMDYWGQGTTVTVSS |
| HMAK199-1 Vh | SEQ ID NO.: 786 | EVQLVQSGAEVKKPGASVKV |
| | | SCKASGYTFANYGIIWVRQA |
| | | PGQGLEWMGWINTYTGKPTY |
| | | AQKFQGRVTMTTDTSTSTAY |
| | | MELSSLRSEDTAVYYCARKL |
| | | FTTMDVTDNAMDYWGQGTTV |
| | | TVSS |
| LINKER | SEQ ID NO.: 787 | GGGGSGGGGS |
| H10F7-M11 Vh | SEQ ID NO.: 788 | EVQLVQSGAEVKKPGSSVKV |
| | | SCKASGYTFTDYEIHWVRQA |
| | | PGQGLEWMGVNDPESGGTFY |
| | | NQKFDGRVTLTADESTSTAY |
| | | MELSSLRSEDTAVYYCTRYS |
| | | KWDSFDGMDYWGQGTTVTVS |
| | | S |
| CH CG1 | SEQ ID NO.: 789 | ASTKGPSVFPLAPSSKSTSG |
| Z NONA | | GTAALGCLVKDYFPEPVTVS |
| | | WNSGALTSGVHTFPAVLQSS |
| | | GLYSLSSVVTVPSSSLGTQT |
| | | YICNVNHKPSNTKVDKKVEP |
| | | KSCDKTHTCPPCPAPELLGG |
| | | PSVFLFPPKPKDTLMISRTP |
| | | EVTCVVVDVSHEDPEVKFNW |
| | | YVDGVEVHNAKTKPREEQYN |
| | | STYRVVSVLTVLHQDWLNGK |
| | | EYKCKVSNKALPAPIEKTIS |
| | | KAKGQPREPQVYTLPPSREE |
| | | MTKNQVSLTCLVKGFYPSDI |
| | | AVEWESNGQPENNYKTTPPV |
| | | LDSDGSFFLYSKLTVDKSRW |
| | | QQGNVFSCSVMHEALHNHYT |
| | | QKSLSLSPGK |
| DVD HEAVY | SEQ ID NO.: 790 | EVQLVQSGAEVKKPGASVKV |
| VARIABLE | | SCKASGYTFNNYGIIWVRQA |
| HMAK199-4-h10F7- | | PGQGLEWMGWINTYTGKPTY |
| M11.8 HC DVD wt | | AQKFQGRVTMTTDTSTSTAY |
| | | MELSSLRSEDTAVYYCARKL |
| | | FNTVAVTDNAMDYWGQGTTV |
| | | TVSSGGGGSGGGGSEVQLVQ |
| | | SGAEVKKPGSSVKVSCKASG |
| | | YTFTDYEIHWVRQAPGQGLE |
| | | WMGVNDPESGGTFYNQKFDG |
| | | RVTLTADESTSTAYMELSSL |
| | | RSEDTAVYYCTRYSKWDSFD |
| | | GMDYWGQGTTVTVSS |
| HMAK199-1 Vh | SEQ ID NO.: 791 | EVQLVQSGAEVKKPGASVKV |
| | | SCKASGYTFNNYGIIWVRQA |
| | | PGQGLEWMGWINTYTGKPTY |
| | | AQKFQGRVTMTTDTSTSTAY |
| | | MELSSLRSEDTAVYYCARKL |
| | | FNTVAVTDNAMDYWGQGTTV |
| | | TVSS |
| LINKER | SEQ ID NO.: 792 | GGGGSGGGGS |
| H10F7-M11 Vh | SEQ ID NO.: 793 | EVQLVQSGAEVKKPGSSVKV |
| | | SCKASGYTFTDYEIHWVRQA |
| | | PGQGLEWMGVNDPESGGTFY |
| | | NQKFDGRVTLTADESTSTAY |
| | | MELSSLRSEDTAVYYCTRYS |
| | | KWDSFDGMDYWGQGTTVTVS |
| | | S |
| CH CG1 | SEQ ID NO.: 794 | ASTKGPSVFPLAPSSKSTSG |
| Z NONA | | GTAALGCLVKDYFPEPVTVS |
| | | WNSGALTSGVHTFPAVLQSS |
| | | GLYSLSSVVTVPSSSLGTQT |
| | | YICNVNHKPSNTKVDKKVEP |
| | | KSCDKTHTCPPCPAPELLGG |
| | | PSVFLFPPKPKDTLMISRTP |
| | | EVTCVVVDVSHEDPEVKFNW |
| | | YVDGVEVHNAKTKPREEQYN |
| | | STYRVVSVLTVLHQDWLNGK |
| | | EYKCKVSNKALPAPIEKTIS |
| | | KAKGQPREPQVYTLPPSREE |
| | | MTKNQVSLTCLVKGFYPSDI |
| | | AVEWESNGQPENNYKTTPPV |
| | | LDSDGSFFLYSKLTVDKSRW |
| | | QQGNVFSCSVMHEALHNHYT |
| | | QKSLSLSPGK |
| DVD HEAVY | SEQ ID NO.: 795 | EVQLVESGGGLVQPGGSLRL |
| VARIABLE | | SCAASGFTFSNYGVTWVRQA |
| HMAK195-21-h10F7- | | PGKGLEWVSMIWADGSTHYA |
| M11.8 HC DVD wt | | SSVKGRFTISRDNSKNTLYL |
| | | QMNSLRAEDTAVYYCAREWQ |
| | | HGPVAYWGQGTLVTVSSGGG |
| | | GSGGGGSEVQLVQSGAEVKK |
| | | PGSSVKVSCKASGYTFTDYE |
| | | IHWVRQAPGQGLEWMGVNDP |
| | | ESGGTFYNQKFDGRVTLTAD |
| | | ESTSTAYMELSSLRSEDTAV |
| | | YYCTRYSKWDSFDGMDYWGQ |
| | | GTTVTVSS |
| HMAK199-1 Vh | SEQ ID NO.: 796 | EVQLVESGGGLVQPGGSLRL |
| | | SCAASGFTFSNYGVTWVRQA |
| | | PGKGLEWVSMIWADGSTHYA |
| | | SSVKGRFTISRDNSKNTLYL |
| | | QMNSLRAEDTAVYYCAREWQ |
| | | HGPVAYWGQGTLVTVSS |
| LINKER | SEQ ID NO.: 797 | GGGGSGGGGS |
| H10F7-M11 Vh | SEQ ID NO.: 798 | EVQLVQSGAEVKKPGSSVKV |
| | | SCKASGYTFTDYEIHWVRQA |
| | | PGQGLEWMGVNDPESGGTFY |
| | | NQKFDGRVTLTADESTSTAY |
| | | MELSSLRSEDTAVYYCTRYS |
| | | KWDSFDGMDYWGQGTTVTVS |
| | | S |
| CH CG1 | SEQ ID NO.: 799 | ASTKGPSVFPLAPSSKSTSG |
| Z NONA | | GTAALGCLVKDYFPEPVTVS |
| | | WNSGALTSGVHTFPAVLQSS |
| | | GLYSLSSVVTVPSSSLGTQT |
| | | YICNVNHKPSNTKVDKKVEP |
| | | KSCDKTHTCPPCPAPELLGG |
| | | PSVFLFPPKPKDTLMISRTP |
| | | EVTCVVVDVSHEDPEVKFNW |
| | | YVDGVEVHNAKTKPREEQYN |
| | | STYRVVSVLTVLHQDWLNGK |
| | | EYKCKVSNKALPAPIEKTIS |
| | | KAKGQPREPQVYTLPPSREE |
| | | MTKNQVSLTCLVKGFYPSDI |
| | | AVEWESNGQPENNYKTTPPV |
| | | LDSDGSFFLYSKLTVDKSRW |
| | | QQGNVFSCSVMHEALHNHYT |
| | | QKSLSLSPGK |
| DVD HEAVY | SEQ ID NO.: 800 | EVQLVESGGGLVQPGGSLRL |
| VARIABLE | | SCAASGFTFSNYGVEWVRQA |
| HMAK195-24-h10F7- | | PGKGLEWVSGIWADGSTHYA |
| M11.8 HC DVD wt | | DTVKSRFTISRDNSKNTLYL |
| | | QMNSLRAEDTAVYYCAREWQ |
| | | HGPVAYWGQGTLVTVSSGGG |
| | | GSGGGGSEVQLVQSGAEVKK |
| | | PGSSVKVSCKASGYTFTDYE |
| | | IHWVRQAPGQGLEWMGVNDP |
| | | ESGGTFYNQKFDGRVTLTAD |
| | | ESTSTAYMELSSLRSEDTAV |
| | | YYCTRYSKWDSFDGMDYWGQ |
| | | GTTVTVSS |
| HMAK199-1 Vh | SEQ ID NO.: 801 | EVQLVESGGGLVQPGGSLRL |
| | | SCAASGFTFSNYGVEWVRQA |
| | | PGKGLEWVSGIWADGSTHYA |
| | | DTVKSRFTISRDNSKNTLYL |
| | | QMNSLRAEDTAVYYCAREWQ |
| | | HGPVAYWGQGTLVTVSS |
| LINKER | SEQ ID NO.: 802 | GGGGSGGGGS |
| H10F7-M11 Vh | SEQ ID NO.: 803 | EVQLVQSGAEVKKPGSSVKV |
| | | SCKASGYTFTDYEIHWVRQA |
| | | PGQGLEWMGVNDPESGGTFY |
| | | NQKFDGRVTLTADESTSTAY |
| | | MELSSLRSEDTAVYYCTRYS |
| | | KWDSFDGMDYWGQGTTVTVS |
| | | S |
| CH CG1 | SEQ ID NO.: 804 | ASTKGPSVFPLAPSSKSTSG |
| Z NONA | | GTAALGCLVKDYFPEPVTVS |
| | | WNSGALTSGVHTFPAVLQSS |
| | | GLYSLSSVVTVPSSSLGTQT |
| | | YICNVNHKPSNTKVDKKVEP |
| | | KSCDKTHTCPPCPAPELLGG |
| | | PSVFLFPPKPKDTLMISRTP |
| | | EVTCVVVDVSHEDPEVKFNW |
| | | YVDGVEVHNAKTKPREEQYN |
| | | STYRVVSVLTVLHQDWLNGK |
| | | EYKCKVSNKALPAPIEKTIS |
| | | KAKGQPREPQVYTLPPSREE |
| | | MTKNQVSLTCLVKGFYPSDI |
| | | AVEWESNGQPENNYKTTPPV |
| | | LDSDGSFFLYSKLTVDKSRW |
| | | QQGNVFSCSVMHEALHNHYT |
| | | QKSLSLSPGK |

### DVD-Ig Heavy and Light Chain Combinations

[0352] Table 18 lists the heavy and light chain sequences used for the expression of different TNF/IL-17 DVD-Ig binding proteins.

TABLE 18
DVD-Ig heavy and light chain combinations

| DVD-Ig Name | Heavy chain construct | Light chain construct |
|---|---|---|
| hMAK195-21-h10F7-M11.8 DVD-Ig | hMAK195-21-GS10- | hMAK195-21-GS10- |
| | h10F7-M11 HC DVD | h10F7-M11 LC DVD |
| hMAK195-24-h10F7-M11.8 DVD-Ig | hMAK195-24-GS10- | hMAK195-24-GS10- |
| | h10F7-M11 HC DVD | h10F7-M11 LC DVD |
| hMAK195-21-h10F7-M10.8 DVD-Ig | hMAK195-21-GS10- | hMAK195-21-GS10- |
| | h10F7-M10 HC DVD | h10F7-M10 LC DVD |
| hMAK195-24-h10F7-M10.8 DVD-Ig | hMAK195-24-GS10- | hMAK195-24-GS10- |
| | h10F7-M10 HC DVD | h10F7-M10 LC DVD |
| hMAK195-21-h10F7-A6.8 DVD-Ig | hMAK195-21-GS10- | hMAK195-21-GS10- |
| | h10F7-A6 HC DVD | h10F7-A6 LC DVD |
| hMAK195-24-h10F7-A6.8 DVD-Ig | hMAK195-24-GS10- | hMAK195-24-GS10- |
| | h10F7-A6 HC DVD | h10F7-A6 LC DVD |
| hMAK195-21-h10F7-A16.8 DVD-Ig | hMAK195-21-GS10- | hMAK195-21-GS10- |
| | h10F7-A16 HC DVD | h10F7-A6 LC DVD |
| hMAK195-24-h10F7-A16.8 DVD-Ig | hMAK195-24-GS10- | hMAK195-24-GS10- |
| | h10F7-A16 HC DVD | h10F7-A6 LC DVD |
| hMAK195-21-h10F7-A11.8 DVD-Ig | hMAK195-21-GS10- | hMAK195-21-GS10- |
| | h10F7-A11 HC DVD | h10F7-M11 LC DVD |
| hMAK195-24-h10F7-A11.8 DVD-Ig | hMAK195-24-GS10- | hMAK195-24-GS10- |
| | h10F7-A11 HC DVD | h10F7-M11 LC DVD |
| hMAK195-21-h10F7-B13.8 DVD-Ig | hMAK195-21-GS10- | hMAK195-21-GS10- |
| | h10F7-B13 HC DVD | h10F7-M11 LC DVD |
| hMAK195-24-h10F7-B13.8 DVD-Ig | hMAK195-24-GS10- | hMAK195-24-GS10- |
| | h10F7-B13 HC DVD | h10F7-M11 LC DVD |
| hMAK195-21-h10F7-B20.8 DVD-Ig | hMAK195-21-GS10- | hMAK195-21-GS10- |
| | h10F7-B20 HC DVD | h10F7-M11 LC DVD |
| hMAK195-24-h10F7-B20.8 DVD-Ig | hMAK195-24-GS10- | hMAK195-24-GS10- |
| | h10F7-B20 HC DVD | h10F7-M11 LC DVD |
| h10F7-M10-hMAk195-21.8 DVD-Ig | h10F7-M10-GS10- | h10F7-M10-GS10- |
| | MAK195-21HC DVD | MAK195-21 LC DVD |
| h10F7-M10-hMAk195-24.8 DVD-Ig | h10F7-M10-GS10- | h10F7-M10-GS10- |
| | MAK195-24HC DVD | MAK195-24 LC DVD |
| hMAK199-1-h10F7-M11.8 DVD-Ig | hMAK199-1-GS10- | hMAK199-1-GS10- |
| | h10F7-M11 HC DVD | h10F7-M11 LC DVD |
| hMAK199-1-h10F7-M10.8 DVD-Ig | hMAK199-1-GS10- | hMAK199-1-GS10- |
| | h10F7-M10 HC DVD | h10F7-M10 LC DVD |
| hMAK199-10-h10F7-M11.8 DVD-Ig | hMAK199-10-GS10- | hMAK199-10-GS10- |
| | h10F7-M11 HC DVD | h10F7-M11 LC DVD |
| hMAK199-10-h10F7-M10.8 DVD-Ig | hMAK199-10-GS10- | hMAK199-10-GS10- |
| | h10F7-M10 HC DVD | h10F7-M10 LC DVD |
| hMAK199-6-h10F7-M11.8 DVD-Ig | hMAK199-8-GS10- | hMAK199-6-GS10- |
| | h10F7-M11 HC DVD | h10F7-M11 LC DVD |
| hMAK199-6-h10F7-M10.8 DVD-Ig | hMAK199-6-GS10- | hMAK199-6-GS10- |
| | h10F7-M10 HC DVD | h10F7-M10 LC DVD |
| hMAK199-4-h10F7-M11.8 DVD-Ig | hMAK199-4-GS10- | hMAK199-4-GS10- |
| | h10F7-M11 HC DVD | h10F7-M11 LC DVD |
| hMAK195-24-h10F7-M11.4 DVD-Ig wt | hMAK195-24-SS- | hMAK195-24-SS- |
| | h10F7-M11 HC DVD wt | h10F7-M11 LC DVD |
| hMAK199-4-h10F7-M11.4 DVD-Ig wt | hMAK199-4-SS- | hMAK199-4-SS- |
| | h10F7-M11 HC DVD wt | h10F7-M11 LC DVD |
| h10F7-M11-hMAk199-4.4 DVD-Ig wt | h10F7-M11-SS- | h10F7-M11-SS- |
| | MAK199-4HC DVD wt | MAK199-4HC DVD |
| h10F7-M11-hMAK199-4.8 DVD-Ig wt | h10F7-M11-GS10- | h10F7-M11-GS10- |
| | MAK199-4HC DVD wt | MAK199-4HC DVD |
| hMAK199-1-h10F7-M11.8 QL DVD-Ig | hMAK199-1-GS10- | hMAK199-1-GS10- |
| | h10F7-M11 QL HC DVD | h10F7-M11 LC DVD |
| hMAK199-1-h10F7-M11.8 YTE DVD-Ig | hMAK199-1-GS10- | hMAK199-1-GS10- |
| | h10F7-M11 YTE HC DVD | h10F7-M11 LC DVD |
| hMAK199-1-h10F7-M10.8 QL DVD-Ig | hMAK199-1-GS10- | hMAK199-1-GS10- |
| | h10F7-M10 QL HC DVD | h10F7-M10 LC DVD |
| hMAK199-1-h10F7-M11.8 DVD-Ig wt | hMAK199-1-GS10- | hMAK199-1-GS10- |
| | h10F7-M10 HC DVD wt | h10F7-M10 LC DVD |
| hMAK199-4-h10F7-M11.8 DVD-Ig wt | hMAK199-4-GS10- | hMAK199-4-GS10- |
| | h10F7-M10 HC DVD wt | h10F7-M10 LC DVD |
| hMAK195-21-h10F7-M11.8 DVD-Ig wt | hMAK195-21-GS10- | hMAK195-21-GS10- |
| | h10F7-M11 HC DVD wt | h10F7-M11 LC DVD |
| hMAK195-24-h10F7-M11.8 DVD-Ig wt | hMAK195-24-GS10- | hMAK195-24-GS10- |
| | h10F7-M11 HC DVD wt | h10F7-M11 LC DVD |

### Functional Characterization of TNF/IL-17 DVD-Ig Proteins

### IL-17 Enzyme-Linked Immunosorbent Assay Protocol

[0353] The following protocol is used to characterize the binding of TNF/IL-17 DVD-Ig proteins to human TNF and IL-17 by enzyme-linked immunosorbent assay (ELISA). An ELISA plate was coated with 50 μl per well of goat anti mouse IgG-Fc at 2 μg/ml, overnight at 4° C. The plate was washed 3 times with PBS/Tween. 50 μl Mab diluted to 1 μg/ml in PBS/0.1% BSA was added to appropriate wells and incubated for 1 hour at room temperature (RT). The plate was washed 3 times with PBS/Tween. 50 μl of serial diluted biotin-human TNF or IL-17 was added to appropriate wells and incubated for 1 hour at RT. The plate was washed 3 times with PBS/Tween. 50 μl of streptavidin-HRP diluted 1:10,000 in PBS/0.1% BSA was added to appropriate wells and incubated for 1 hour at RT. The plate was washed 3 times with PBS/Tween. 50 μl of TMB was added to appropriate wells and the reaction allowed to proceed for 1 minute. The reaction was stopped with 50 μl/well 2NH₂SO₄ and the absorbance read at 450 nm. Results are shown in Table 19.

TABLE 19
Binding of TNF/IL-17 DVD-Ig proteins
to human TNF and IL-17 by ELISA

| | EC50 in | EC50 in |
|---|---|---|
| | hIL17A | h TNF |
| DVD-Ig Name | ELISA (pM) | ELISA (pM) |
| hMAK195-21-h10F7-M11.8 DVD-Ig | 95 | 110 |
| hMAK195-24-h10F7-M11.8 DVD-Ig | 84 | 200 |
| hMAK195-21-h10F7-M10.8 DVD-Ig | 100 | 90 |
| hMAK195-24-h10F7-M10.8 DVD-Ig | 100 | 200 |
| hMAK195-21-h10F7-A6.8 DVD-Ig | 130 | 13 |
| hMAK195-24-h10F7-A6.8 DVD-Ig | 188 | 12 |
| hMAK195-21-h10F7-A16.8 DVD-Ig | 230 | 34 |
| hMAK195-24-h10F7-A16.8 DVD-Ig | 93 | 66 |
| hMAK195-21-h10F7-A11.8 DVD-Ig | 300 | 300 |
| hMAK195-24-h10F7-A11.8 DVD-Ig | 295 | 295 |
| hMAK195-21-h10F7-B13.8 DVD-Ig | 200 | 373 |
| hMAK195-21-h10F7-B20.8 DVD-Ig | 242 | 300 |
| hMAK199-1-h10F7-M10.8 DVD-Ig | 81 | 220 |
| hMAK199-1-h10F7-M11.8 DVD-Ig | 78 | 220 |
| hMAK199-10-h10F7-M10.8 DVD-Ig | 79 | 220 |
| hMAK199-10-h10F7-M11.8 DVD-Ig | 133 | 205 |
| hMAK199-6-h10F7-M10.8 DVD-Ig | 163 | 168 |
| hMAK199-6-h10F7-M11.8 DVD-Ig | 104 | 139 |
| hMAK199-4-h10F7-M11.8 DVD-Ig | 130 | 30 |
| hMAK195-24-h10F7-M11.4 DVD-Ig wt | >500 | 200 |
| hMAK199-4-h10F7-M11.4 DVD-Ig wt | >500 | 200 |
| h10F7-M11-hMAk199-4.4 DVD-Ig wt | 40 | >100 |
| h10F7-M11-hMAK199-4.8 DVD-Ig wt | 50 | >100 |
| hMAK199-1-h10F7-M11.8 QL DVD-Ig | 142 | 119 |
| hMAK199-1-h10F7-M11.8 YTE DVD-Ig | 50 | 100 |
| hMAK199-1-h10F7-M10.8 QL DVD-Ig | 63 | 183 |
| hMAK199-1-h10F7-M11.8 DVD-Ig wt | 88 | 95 |
| hMAK199-4-h10F7-M11.8 DVD-Ig wt | 100 | 61 |
| hMAK195-21-h10F7-M11.8 DVD-Ig wt | 110 | 95 |
| hMAK195-24-h10F7-M11.8 DVD-Ig wt | 120 | 141 |

### Affinity Measurement of Anti TNF/IL-17 DVD-Ig by Surface Plasmon Resonance

[0354] The binding of antibodies to purified recombinant IL-17 and TNFα proteins were determined by surface plasmon resonance-based measurements with a Biacore® T200 instrument (GE Healthcare) using running HBS-EP (10 mM HEPES [pH 7.4], 150 mM NaCl, 3 mM EDTA, and 0.005% surfactant P20) containing 0.1 mg/ml BSA at 25° C. All chemicals were obtained from Biacore® AB (GE Healthcare) or otherwise from a different source as described in the text. Approximately 5000 RU of goat anti-human IgG (Fcγ) fragment specific polyclonal antibody (Pierce Biotechnology Inc, Rockford, Ill.) diluted in 10 mM sodium acetate (pH 4.5) was directly immobilized across a CM5 research grade biosensor chip using a standard amine coupling kit according to manufacturer's instructions and procedures at 25 ug/ml. Unreacted moieties on the biosensor surface were blocked with ethanolamine. Modified carboxymethyl dextran surface in flowcell 2, 3 and 4 were used as a reaction surface. Modified carboxymethyl dextran with goat IgG in flow cell 1 was used as the reference surface. For kinetic analysis, rate equations derived from the 1:1 Langmuir binding model were fitted simultaneously to association and dissociation phases of all six injections (using global fit analysis with local float for Rmax) with the use of Biacore T200 Evaluation software v.1.0. Purified antibodies were diluted in HEPES-buffered saline for capture across goat anti-human IgG specific reaction surfaces. Antibodies to be captured as ligand (1-5 ng/ml) were injected over reaction matrices at a flow rate of 50 μl/minute. Association phase was monitored for 5 minutes, while dissociation phase was monitored for 10-60 minutes to accommodate for slower off-rates. The association and dissociation rate constants, ka (unit M-1 s-1) and kd (unit s-1) were determined under a continuous flow rate of 50 μl/minute. Rate constants were derived by making kinetic binding measurements at six different antigen concentrations ranging from 0.78 nM to 100 nM, depending on the species of IL-17 or TNFα tested. The association ka, dissociation rate kd and equilibrium dissociation constant KD were calculated with the use of the same Biacore T200 Evaluation software v.1.0.

TABLE 20
Affinity of TNF/IL-17 DVD-Ig proteins to IL-17 by Biacore

| | Human IL17AA | | | Cyno IL17AA | | |
|---|---|---|---|---|---|---|
| DVD-Ig Name | kₐ | k_{d} | K_{D} | kₐ | k_{d} | K_{D} |
| hMAK195-21-h10F7- | 2.42E+05 | 1.05E−05 | 4.34E−11 | 2.48E+05 | 6.28E−06 | 2.53E−11 |
| M11.8 DVD-Ig | | | | | | |
| hMAK195-24-h10F7- | 2.51E+05 | 1.07E−05 | 4.27E−11 | 2.59E+05 | 6.25E−06 | 2.41E−11 |
| M11.8 DVD-Ig | | | | | | |
| hMAK199-1-h10F7- | 3.29E+05 | 1.11E−05 | 3.37E−11 | 2.99E+05 | 2.15E−06 | 7.22E−12 |
| M11.8 DVD-Ig | | | | | | |
| hMAK199-4-h10F7- | 3.23E+05 | 8.76E−06 | 2.71E−11 | 2.99E+05 | 2.57E−06 | 8.61E−12 |
| M11.8 DVD-Ig | | | | | | |
| hMAK199-1-h10F7- | 2.21E+05 | <1.00E−06 | <4.52E−12 | | | |
| M11.8 QL DVD-Ig | | | | | | |
| hMAK199-1-h10F7- | 3.07E+05 | 7.90E−06 | 2.57E−11 | 2.67E+05 | 1.18E−06 | 4.44E−12 |
| M11.8 DVD-Ig wt | | | | | | |
| hMAK199-4-h10F7- | 3.11E+05 | 3.11E+05 | 2.59E−11 | 2.78E+05 | 3.15E−06 | 1.13E−11 |
| M11.8 DVD-Ig wt | | | | | | |
| hMAK195-21-h10F7- | 2.39E+05 | 9.26E−06 | 3.86E−11 | 2.03E+05 | 2.21E−06 | 1.09E−11 |
| M11.8 DVD-Ig wt | | | | | | |
| hMAK195-24-h10F7- | 2.33E+05 | 8.48E−06 | 3.63E−11 | 2.14E+05 | 4.29E−06 | 2.01E−11 |
| M11.8 DVD-Ig wt | | | | | | |

TABLE 21
Affinity of TNF/IL-17 DVD-Ig proteins to TNF by Biacore

| | Human TNFa | | | Rhesus TNFa | | |
|---|---|---|---|---|---|---|
| DVD-Ig Name | kₐ | k_{d} | K_{D} | kₐ | k_{d} | K_{D} |
| hMAK195-21-h10F7- | 6.29E+06 | 5.70E−05 | 9.06E−12 | 5.21E+06 | 1.32E−04 | 2.54E−11 |
| M11.8 DVD-Ig | | | | | | |
| hMAK195-24-h10F7- | 5.62E+06 | 4.69E−05 | 8.36E−12 | 4.78E+06 | 3.43E−04 | 7.16E−11 |
| M11.8 DVD-Ig | | | | | | |
| hMAK199-1-h10F7- | 4.31E+06 | 2.37E−05 | 5.50E−12 | 2.21E+06 | 2.39E−05 | 1.08E−11 |
| M11.8 DVD-Ig | | | | | | |
| hMAK199-4-h10F7- | 5.61E+06 | 1.73E−05 | 3.08E−12 | 2.91E+06 | 2.25E−05 | 7.72E−12 |
| M11.8 DVD-Ig | | | | | | |
| hMAK199-1-h10F7- | 4.28E+06 | 2.40E−05 | 5.61E−12 | 2.20E+06 | 3.03E−05 | 1.37E−11 |
| M11.8 DVD-Ig wt | | | | | | |
| hMAK199-4-h10F7- | 5.80E+06 | 1.77E−05 | 3.06E−12 | 3.05E+06 | 2.48E−05 | 8.13E−12 |
| M11.8 DVD-Ig wt | | | | | | |
| hMAK195-21-h10F7- | 5.83E+06 | 4.97E−05 | 8.52E−12 | 4.56E+06 | 1.41E−04 | 3.10E−11 |
| M11.8 DVD-Ig wt | | | | | | |
| hMAK195-24-h10F7- | 5.62E+06 | 4.86E−05 | 8.65E−12 | 6.12E+06 | 4.60E−04 | 7.52E−11 |
| M11.8 DVD-Ig wt | | | | | | |

### TNF Neutralization Potency of TNF/IL-17 DVD-Ig Molecules

### L929 Bioassay for Measuring TNF Neutralization Potency

[0355] Human TNF Lot No. 1277249 (1.85 mg/mL) was prepared at Abbott Bioresearch Center (Worcester, Mass., US) and received from the Biologics Pharmacy. Actinomycin D (catalog # A1410) was purchased from Sigma Aldrich and resuspended at a stock concentration of 10 mg/mL in DMSO.

[0356] Assay Media: 10% FBS (Hyclone #SH30070.03), Gibco reagents: RPMI 1640 (#21870), 2 mM L-glutamine (#25030), 50 units/mL penicillin/50 μg/mL streptomycin (#15140), 0.1 mM MEM non-essential amino acids (#11140) and 5.5×10⁻⁵ M 2-mercaptoethanol (#21985-023).

[0357] L929 cells were grown to a semi-confluent density and harvested using 0.05% tryspin (Gibco #25300). The cells were washed with PBS, counted, and resuspended at 1E6 cells/mL in assay media containing 4 μg/mL actinomycin D. The cells were seeded in a 96-well plate (Costar #3599) at a volume of 50 μL and 5E4 cells/well. Wells received 50 μL of assay media, bringing the volume to 100 μL.

[0358] A test sample was prepared as follows. The DVD-Ig™ and control IgG were diluted to a 4× concentration in assay media and serial 1:3 dilutions were performed. TNF was diluted to 400 pg/mL huTNF in assay media. DVD-Ig sample (200 μL) was added to the TNF (200 μL) in a 1:2 dilution scheme and allowed to incubate for 0.5 hour at room temperature.

[0359] To measure huTNF neutralization potency of DVD-Ig in this assay, the DVD-Ig/TNF solution was added to the plated cells at 100 μL for a final concentration of DVD-Ig at 375 nM-0.019 nM DVD-Ig. The final concentration of TNF was 100 pg/mL. The plates were incubated for 20 hours at 37° C., 5% CO₂. To quantitate viability, 100 μL was removed from the wells and 10 μL of WST-1 reagent (Roche cat #11644807001) was added. Plates were incubated under assay conditions for 3.5 hours, centrifuged at 500×g, and 75 μL of supernatant transferred to an ELISA plate (Costar cat #3369). The plates were read at OD 420-600 nm on a Spectromax 190 ELISA plate reader. The neutralization potency of selected TNF/IL-17 DVD-Ig binding proteins is shown in Table 22.

TABLE 22
In vitro potency for human TNF

| | Potency IC50 |
|---|---|
| DVD-Ig | (nM) |
| hMAK195-21-h10F7-M11.8 DVD-Ig | 0.013 |
| hMAK195-24-h10F7-M11.8 DVD-Ig | 0.019 |
| hMAK195-21-h10F7-A6.8 DVD-Ig | 0.019 |
| hMAK195-24-h10F7-A6.8 DVD-Ig | 0.037 |
| ShMAK195-21-h10F7-A16.8 DVD-Ig | 0.034 |
| hMAK195-24-h10F7-A16.8 DVD-Ig | 0.044 |
| hMAK199-1-h10F7-M10.8 DVD-Ig | 0.037 |
| hMAK199-1-h10F7-M11.8 DVD-Ig | .031 |
| hMAK199-10-h10F7-M10.8 DVD-Ig | 0.031 |
| hMAK199-10-h10F7-M11.8 DVD-Ig | 0.031 |
| hMAK199-6-h10F7-M10.8 DVD-Ig | 0.009 |
| hMAK199-6-h10F7-M11.8 DVD-Ig | 0.009 |
| hMAK199-4-h10F7-M11.8 DVD-Ig | .023 |
| hMAK195-24-h10F7-M11.4 DVD-Ig wt | 0.021 |
| hMAK199-4-h10F7-M11.4 DVD-Ig wt | 0.01 |
| h10F7-M11-hMAK199-4.4 DVD-Ig wt | 4.195 |
| h10F7-M11-hMAK199-4.8 DVD-Ig wt | >100 nM |
| hMAK199-1-h10F7-M11.8 QL DVD-Ig | 0.027 |
| hMAK199-1-h10F7-M11.8 DVD-Ig wt | 0.033 |
| hMAK199-4-h10F7-M11.8 DVD-Ig wt | 0.014 |
| hMAK195-21-h10F7-M11.8 DVD-Ig wt | 0.01 |
| hMAK195-24-h10F7-M11.8 DVD-Ig wt | 0.019 |
| h10F7-M10-MAK195-24DVD | 2.558 |

### Assay for Human and Cyno IL-17 Induced IL-6 Secretion in Primary Human Foreskin Fibroblasts HS27

[0360] The human HS27 cell line (ATCC Accession # CRL-1634) secretes IL-6 in response to IL-17. The IL-17-induced IL-6 secretion is inhibited by neutralizing anti-IL-17 antibodies (See, e.g., J. Immunol., 155: 5483-5486 (1995); Cytokine, 9: 794-800 (1997)).

[0361] HS27 cells were maintained in assay medium: DMEM high glucose medium (Gibco #11965) with 10% fetal bovine serum (Gibco #26140), 4 mM L-glutamine, 1 mM sodium pyruvate, penicillin G (100 U/500 ml) and streptomycin (100 μg/500 ml). Cells were grown in T150 flasks until they were about 80-90% confluent the day of the assay. Human IL-17A (R&D Systems, #317-IL/CF), or cynomolgous monkey (cyno) IL-17A (generated at Abbott) was reconstituted in sterile PBS without Ca²⁺ and Mg²⁺ stored frozen, freshly thawed for use and diluted to 240 pM (4×) or 4 nM (4×) for IL-17A/F in assay medium. Serial dilutions of antibodies were made in a separate plate (4× concentrations), mixed with equal volume of 240 pM (4×) of huIL-17 or cynolL-17A or 4 nM (4×) huIL-17A/F and incubated at 37° C. for 1 hour. HS27 cells (typically about 20,000 cells in 50 μl assay medium) were added to each well of a 96-well flat-bottom tissue culture plate (Costar #3599), followed by addition of 50 μl of the pre-incubated antibody plus IL-17 mix. The final concentration of human and cynoIL-17A was 60 pM. The final concentration of human IL-17A/F was 1 nM. Cells were incubated for about 24 hours at 37° C. The media supernatants were then collected. The level of IL-17 neutralization was measured by determination of IL-6 amounts in supernatant using a commercial Meso Scale Discovery kit (cat # L411AKB-1) according to manufacturer's instruction. IC50 values were obtained using logarithm of antibody versus IL-6 amount variable slope fit.

Assay for IL-17 Induced IL-6 Secretion from Murine Embryonic Fibroblast Cell Line (NIH3T3)

[0362] The murine NIH3T3 cell line (ATCC Accession # CRL-1658) secretes IL-6 in response to mouse, rat, or rabbit IL-17A when added in the presence of a low level of TNFα (R&D Systems, Cat #410-MT). The IL-17 induced IL-6 secretion is inhibited by neutralizing anti-IL-17 DVD-Ig.

[0363] NIH3T3 cells were maintained in assay medium: DMEM (Invitrogen Cat #11965-092) with 10% fetal bovine serum (Gibco #26140-079), 1% Non Essential Amino Acids, 2 mM L-glutamine, 1 mM sodium pyruvate, penicillin G (100 U/500 ml), and streptomycin (100 μg/500 ml). Cells were grown in T150 flasks until they were about 80-90% confluent the day of the assay. Rat IL17A (Prospec bio, Cat # CYT-542) was reconstituted in sterile PBS, without Ca2+ and Mg2+, with 0.1% BSA, aliquoted and stored frozen at 100 μg/mL. Rabbit IL17A (Abbott, A-1239293.0) was aliquoted and stored frozen at 260 μg/mL. Murine TNF-α was reconstituted in 0.1% BSA/PBS without Ca²⁺ and Mg²⁺ at a concentration of 10 μg/mL, aliquoted, and stored frozen. Freshly thawed IL-17 antibodies were diluted to 200 μg/ml (4×) in assay medium. Serial dilutions of antibodies were made in a separate plate (4× concentrations), mixed with equal volume of 40 ng/ml (4×) mouse or rat IL-17A or 100 ng/mL rabbit IL-17A, and incubated at 37° C. for 1 hour.

[0364] NIH3T3 cells (typically about 400,000 cells in 50 μl assay medium) were added to each well of a 96-well flat-bottom tissue culture plate (Costar #3599), followed by addition of 50 μl of the pre-incubated with DVD-Ig plus IL-17. Mu TNF-α at 5.5 ng/mL (10×) was added in 11 μl of media to each well. The final concentration of IL-17A was 10 ng/ml for murine and rat and 25 ng/mL for rabbit. The final concentration for mu TNFα was 0.55 ng/mL. Cells were incubated for about 24 hours at 37° C. The media supernatants were then collected. The level of IL-17 neutralization was measured by determination of IL-6 amounts in supernatant using a commercial Meso Scale Discovery kit (cat # K112AKA-4) according to manufacturer's instruction. IC50 values were obtained using logarithm of antibody versus IL-6 amount variable slope fit relative to baseline IL-6 levels induced with TNF alone.

TABLE 23
IL-6 secretion from fibroblast cell line in response to IL-17A

| DVD-Ig Name | Human | Cyno | Mouse | Rat | Rabbit |
|---|---|---|---|---|---|
| hMAK195-21-h10F7-M11.8 DVD-Ig | 207 | 30 | 47 | 490 | 219 |
| hMAK195-24-h10F7-M11.8 DVD-Ig | 200 | 36 | 33 | 251 | 206 |
| hMAK195-21-h10F7-M10.8 DVD-Ig | 200 | 49 | | | |
| hMAK195-24-h10F7-M10.8 DVD-Ig | 200 | 61 | | | |
| hMAK195-21-h10F7-A6.8 DVD-Ig | 200 | 76 | | | |
| hMAK195-24-h10F7-A6.8 DVD-Ig | 200 | 62 | | | |
| hMAK195-21-h10F7-A16.8 DVD-Ig | 200 | 78 | | | |
| hMAK195-24-h10F7-A16.8 DVD-Ig | 200 | 81 | | | |
| hMAK195-21-h10F7-A11.8 DVD-Ig | 200 | 76 | | | |
| hMAK195-24-h10F7-A11.8 DVD-Ig | 200 | 81 | | | |
| hMAK195-21-h10F7-B13.8 DVD-Ig | 200 | 58 | | | |
| hMAK195-21-h10F7-B20.8 DVD-Ig | 200 | 44 | | | |
| hMAK199-1-h10F7-M10.8 DVD-Ig | 145 | 33 | | | |
| hMAK199-1-h10F7-M11.8 DVD-Ig | 200 | 29 | 33 | 248 | 211 |
| hMAK199-10-h10F7-M10.8 DVD-Ig | 200 | 26 | | | |
| hMAK199-10-h10F7-M11.8 DVD-Ig | 200 | 33 | | | |
| hMAK199-6-h10F7-M10.8 DVD-Ig | 200 | 31 | | | |
| hMAK199-6-h10F7-M11.8 DVD-Ig | 200 | 32 | | | |
| hMAK199-4-h10F7-M11.8 DVD-Ig | 100 | 21 | 26 | 217 | 223 |
| hMAK195-24-h10F7-M11.4 DVD-Ig wt | 200 | 170 | | | |
| hMAK199-4-h10F7-M11.4 DVD-Ig wt | 200 | 30 | | | |
| h10F7-M11-hMAk199-4.4 DVD-Ig wt | 40 | 57 | | | |
| h10F7-M11-hMAK199-4.8 DVD-Ig wt | 50 | 14 | | | |
| hMAK199-1-h10F7-M11.8 QL DVD-Ig | 100 | 24 | | | |
| hMAK199-1-h10F7-M11.8 YTE DVD-Ig | 100 | | | | |
| hMAK199-1-h10F7-M10.8 QL DVD-Ig | NA | | | | |
| hMAK199-1-h10F7-M11.8 DVD-Ig wt | 95 | 25 | 54 | 750 | 311 |
| hMAK199-4-h10F7-M11.8 DVD-Ig wt | 46 | 24 | 27 | 364 | 159 |
| hMAK195-21-h10F7-M11.8 DVD-Ig wt | 100 | 39 | 48 | 422 | 180 |
| hMAK195-24-h10F7-M11.8 DVD-Ig wt | 77 | 33 | 44 | 367 | 209 |

### Therapeutic Efficacy of IL-17 Antibodies

### Neutralizing Potency of IL-17 Antibodies in Acute IL-17 Induced KC Model

[0365] Several TNF/IL-17 DVD-Ig proteins were evaluated in the acute in vivo rhIL17-induced KC model. Female BALB/cJ mice were pre-dosed with antibodies intra-peritoneally (i.p.), and 18 hurs later they were injected i.p. with 3 μg rhIL17 in a 500 μL volume. After 1 hour, the mice were sacrificed, and the levels of KC were assessed by MesoScale. ED50 values for % inhibition of KC were determined. As shown in Table 24, the three DVD-Ig proteins fully neutralized IL-17 and TNF in vivo.

TABLE 24
ED50 in mouse cytokine challenge models

| DVD-Ig Name | IL-17 induced KC |
|---|---|
| hMAK199-1-h10F7-M11.8 DVD-Ig wt | 65 |
| hMAK199-4-h10F7-M11.8 DVD-Ig wt | 24 |
| hMAK195-24-h10F7-M11.8 DVD-Ig wt | 27 |

Neutralizing Potency of TNF/IL-17 DVD-Ig in rhTNF/D-Galactosamine-Induced Lethality Mouse Model

[0366] The TNF arms of the TNF/IL17 DVD-Ig molecules were also evaluated in the rhTNF/D-galactosamine-induced lethality model. Female C57BL6/N mice were pre-dosed with binding protein (i.p.) and 18 hours later were challenged (i.p.) with 0.1 μg rh TNF and 20 mg D-galactosamine in 500 μL 0.9% sodium chloride and monitored for survival over 48 hours. ED50 values for percent survival were calculated. As shown in Table 25, three distinct anti-IL-17/TNF DVD-Ig constructs were tested in these models and all three constructs fully neutralized human IL-17 and human TNF induced bioactivity.

TABLE 25
ED50 in mouse cytokine challenge models

| | LPS/D-gal induced |
|---|---|
| DVD-Ig Name | lethality |
| hMAK199-1-h10F7-M11.8 DVD-Ig wt | 0.02 |
| hMAK199-4-h10F7-M11.8 DVD-Ig wt | 0.014 |
| hMAK195-24-h10F7-M11.8 DVD-Ig wt | 0.016 |

### PK Bioanalytical Protocol for TNF/IL17 DVD-Ig PK Studies in Rat

[0367] Male Jugular Vein Cannulated Sprague-Dawley rats weighing approximately 280 g were administered a single dose of DVD-Ig or parental antibody at 4 mg/kg via the jugular vein cannula. Blood samples (50-100 ul) were collected from the tail vein over a period of 28 days into serum separator tubes, allowed to clot at room temperature for at least an hour, and centrifuged for 10 minutes at 4° C. Serum samples were frozen at −80° C. until analysis.

[0368] Serum samples were thawed at room temperature, centrifuged for 10 minutes at 4° C. and DVD-Ig concentrations determined by ligand binding using Meso Scale Discovery (MSD) system. Briefly, strepatavidin plates were coated with biotinylated human antigen and incubated overnight. Plates were blocked, and the DVD-Ig containing serum samples diluted with assay buffer (final serum concentration 1%), incubated on the plates for one hour and detected using Sulfo-tag-labeled goat anti-human IgG. Concentrations were calculated with the help of a standard curve using four parameter logistic fit.

[0369] Pharmacokinetic parameters for each animal were calculated with WinNonlin software Version 5.2.1 by non-compartmental analysis using linear trapezoidal fit.

TABLE 26
PK properties of TNF/IL-17 DVD-Ig molecules

| | | Cmax | Vss | CL |
|---|---|---|---|---|
| | T½ | (ug/ | (mL/ | (mg/h/ |
| DVD-Ig Name | (day) | mL) | kg) | kg) |
| hMAK195-21-h10F7-M11.8 DVD-Ig | 10.4 | 153.5 | 55.5 | 0.17 |
| hMAK195-24-h10F7-M11.8 DVD-Ig | 12.0 | 159.4 | 64.3 | 0.17 |
| hMAK195-21-h10F7-M10.8 DVD-Ig | 7.2 | 149.6 | 57.9 | 0.25 |
| hMAK199-1-h10F7-M10.8 DVD-Ig | 9.2 | 132.4 | 61.2 | 0.20 |
| hMAK199-4-h10F7-M11.8 DVD-Ig | 7.8 | 110.0 | 64.5 | 0.24 |
| hMAK199-1-h10F7-M11.8 DVD-Ig wt | 11.3 | 135.8 | 56.3 | 0.14 |
| hMAK199-4-h10F7-M11.8 DVD-Ig wt | 7.7 | 125.9 | 58.9 | 0.22 |
| hMAK195-21-h10F7-M11.8 DVD-Ig wt | 9.3 | 91.3 | 87.6 | 0.28 |
| hMAK195-24-h10F7-M11.8 DVD-Ig wt | 11.4 | 86.4 | 93.6 | 0.25 |

### Determination of DVD-Ig Serum Stability In Vitro

### In Vitro Serum Stability Assay Protocol

[0370] Antibodies and DVD-Igs were received at concentrations of 5 mg/mL, labeled with Alexa Fluor 488 and purified using spin columns The Alexa Fluor 488 dye has a tetrafluorrophenyl (TFP) ester moiety that reacts efficiently with primary amines of proteins to form stable dye-protein conjugates. The labeled proteins have absorption and fluorescence emission maxima of approximately 494 nm and 519 nm respectively. Rat serum containing 1 mM sodium azide was used to dilute labeled proteins to 0.5 mg/mL and incubated at 37° C. for up to 7 days. Each sample was also diluted in PBS as a negative control. Samples were analyzed by size exclusion chromatography on Days 0, 1, 4 and 7 using a Superose 6 column. The formation of protein aggregates and fragments was used to monitor in-serum stability of molecules. Slopes were calculated by plotting the percentage of the area of high molecular weight aggregates versus time.

TABLE 27
Formation of DVD-Ig protein aggregates as a measure of stability

| DVD-Ig Name | Slope |
|---|---|
| hMAK199-1-h10F7-M10.8 DVD-Ig | 0.16, 0.21 |
| hMAk199-1-h10F7-M11.8 DVD-Ig | 0.41 |
| hMAk199-10-h10F7-M10.8 DVD-Ig | 0.30 |
| hMAk199-10-h10F7-M11.8 DVD-Ig | 0.12 |

### Example 4

### Generation of Additional DVD-Binding Proteins

[0371] DVD-binding protein molecules capable of binding two antigens are constructed using two parent monoclonal antibodies, one against human antigen A, and the other against human antigen B, selected as described herein.

### Generation of a DVD-Binding Protein Having Two Linker Lengths

[0372] A constant region containing μ1 Fc with mutations at 234, and 235 to eliminate ADCC/CDC effector functions is used. Four different anti-A/B DVD-binding protein constructs are generated: 2 with short linker and 2 with long linker, each in two different domain orientations: V_{A}-V_{B}-C and V_{B}-V_{A}-C. The linker sequences, derived from the N-terminal sequence of human Cl/Ck or CH1 domain, are as follows:

[0373] For DVDAB constructs:

For DVDAB constructs:
light chain (if anti-A has λ): Short linker:

(SEQ ID NO: 15)

QPKAAP;
Long linker:

(SEQ ID NO: 16)

QPKAAPSVTLFPP
light chain (if anti-A has κ): Short linker:

(SEQ ID NO: 13)

TVAAP;
Long linker:

(SEQ ID NO: 14)

TVAAPSVFIFPP
heavy chain (γ1): Short linker:

(SEQ ID NO: 21)

ASTKGP;
Long linker:

(SEQ ID NO: 22)

ASTKGPSVFPLAP
For DVDBA constructs:
light chain (if anti-B has λ): Short linker:

(SEQ ID NO: 15)

QPKAAP;
Long linker:

(SEQ ID NO: 16)

QPKAAPSVTLFPP
light chain (if anti-B has k): Short linker:

(SEQ ID NO: 13)

TVAAP;
Long linker:

(SEQ ID NO: 14)

TVAAPSVFIFPP
heavy chain (γ1): Short linker:

(SEQ ID NO: 21)

ASTKGP;
Long linker:

(SEQ ID NO: 22)

ASTKGPSVFPLAP

[0374] Heavy and light chain constructs are subcloned into the pBOS expression vector, and expressed in COS cells, followed by purification by Protein A chromatography. The purified materials are subjected to SDS-PAGE and SEC analysis.

[0375] Table 28 describes the heavy chain and light chain constructs used to express each anti-A/B DVD-binding protein.

TABLE 28
Anti-A/B DVD-Binding Protein Constructs

| DVD protein | Heavy chain construct | Light chain construct |
|---|---|---|
| DVDABSL | DVDABHC-SL | DVDABLC-SL |
| DVDABLL | DVDABHC-LL | DVDABLC-LL |
| DVDBASL | DVDBAHC-SL | DVDBALC-SL |
| DVDBALL | DVDBAHC-LL | DVDBALC-LL |

### INCORPORATION BY REFERENCE

[0376] The present disclosure incorporates by reference in their entirety techniques well known in the field of molecular biology and drug delivery. These techniques include, but are not limited to, techniques described in the following publications:
[0377] Ausubel et al. (eds.), CURRENT PROTOCOLS IN MOLECULAR BIOLOGY, John Wiley &Sons, NY (1993);
[0378] Ausubel, F. M. et al. eds., SHORT PROTOCOLS IN MOLECULAR BIOLOGY (4^{th} Ed. 1999) John Wiley & Sons, NY. (ISBN 0-471-32938-X);
[0379] CONTROLLED DRUG BIOAVAILABILITY, DRUG PRODUCT DESIGN AND PERFORMANCE, Smolen and Ball (eds.), Wiley, New York (1984);
[0380] Giege, R. and Ducruix, A. Barrett, CRYSTALLIZATION OF NUCLEIC ACIDS AND PROTEINS, a Practical Approach, 2^{nd} ea., pp. 20 1-16, Oxford University Press, New York, N.Y., (1999);
[0381] Goodson, in MEDICAL APPLICATIONS OF CONTROLLED RELEASE, vol. 2, pp. 115-138 (1984);
[0382] Hammerling, et al., in: MONOCLONAL ANTIBODIES AND T-CELL HYBRIDOMAS 563-681 (Elsevier, N.Y., 1981;
[0383] Harlow et al., ANTIBODIES: A LABORATORY MANUAL, (Cold Spring Harbor Laboratory Press, 2^{nd} ed. 1988);
[0384] Kabat et al., SEQUENCES OF PROTEINS OF IMMUNOLOGICAL INTEREST (National Institutes of Health, Bethesda, Md. (1987) and (1991);
[0385] Kabat, E. A., et al. (1991) SEQUENCES OF PROTEINS OF IMMUNOLOGICAL INTEREST, Fifth Edition, U.S. Department of Health and Human Services, NIH Publication No. 91-3242;
[0386] Kontermann and Dubel eds., ANTIBODY ENGINEERING (2001) Springer-Verlag. New York. 790 pp. (ISBN 3-540-41354-5);
[0387] Kriegler, Gene Transfer and Expression, A Laboratory Manual, Stockton Press, NY (1990);
[0388] Lu and Weiner eds., CLONING AND EXPRESSION VECTORS FOR GENE FUNCTION ANALYSIS (2001) BioTechniques Press. Westborough, Mass. 298 pp. (ISBN 1-881299-21-X);
[0389] MEDICAL APPLICATIONS OF CONTROLLED RELEASE, Langer and Wise (eds.), CRC Pres., Boca Raton, Fla. (1974);
[0390] Old, R. W. & S. B. Primrose, PRINCIPLES OF GENE MANIPULATION: AN INTRODUCTION TO GENETIC ENGINEERING (3d Ed. 1985) Blackwell Scientific Publications, Boston. Studies in Microbiology; V.2:409 pp. (ISBN 0-632-01318-4);
[0391] Sambrook, J. et al. eds., MOLECULAR CLONING: A LABORATORY MANUAL (2d Ed. 1989) Cold Spring Harbor Laboratory Press, NY. Vols. 1-3. (ISBN 0-87969-309-6);
[0392] SUSTAINED AND CONTROLLED RELEASE DRUG DELIVERY SYSTEMS, J. R. Robinson, ed., Marcel Dekker, Inc., New York, 1978;
[0393] Winnacker, E. L. FROM GENES TO CLONES: INTRODUCTION TO GENE TECHNOLOGY (1987) VCH Publishers, NY (translated by Horst Ibelgaufts). 634 pp. (ISBN 0-89573-614-4).

[0394] The contents of all cited references (including literature references, patents, patent applications, and websites) that may be cited throughout this application are hereby expressly incorporated by reference in their entirety for any purpose, as are the references cited therein. The disclosure will employ, unless otherwise indicated, conventional techniques of immunology, molecular biology and cell biology, which are well known in the art.

### EQUIVALENTS

[0395] The disclosure may be embodied in other specific forms without departing from the spirit or essential characteristics thereof. The foregoing embodiments are therefore to be considered in all respects illustrative rather than limiting of the disclosure. Scope of the disclosure is thus indicated by the appended claims rather than by the foregoing description, and all changes that come within the meaning and range of equivalency of the claims are therefore intended to be embraced herein.

1. A binding protein capable of binding TNF, the binding protein comprising a polypeptide chain, wherein the polypeptide chain comprises VD1-(X1)n-VD2-C-(X2)n, wherein;
VD1 is a first heavy chain variable domain;
VD2 is a second heavy chain-variable domain;
C is a heavy chain constant domain;
X1 is a linker with the proviso that it is not CH1;
X2 is an Fc region;
(X1)n, wherein n is 0 or 1;
(X2)n, wherein n is 0 or 1; and
wherein
(a) VD1 or VD2 comprises three CDRs from SEQ ID NO: 541, 551, 561, 571, 581, 591, 601, 606, 611, 616, 621, 626, 631, 636, 643, 653, 661, 671, 681, 691, 701, 711, 721, 731, 741, 753, 763, 771, 776, 781, 786, 791, 796, 801, 805, 807, 809, or any one of 36-41, 48-72, or 88-97;
(b) VD1 and VD2 independently comprise three CDRs from SEQ ID NO: 541, 551, 561, 571, 581, 591, 601, 606, 611, 616, 621, 626, 631, 636, 643, 653, 661, 671, 681, 691, 701, 711, 721, 731, 741, 753, 763, 771, 776, 781, 786, 791, 796, 801, 805, 807, or 809, or any one of 36-41, 48-72, or 88-97;
(c) VD1 comprises three CDRs from SEQ ID NO: 541, 551, 561, 571, 581, 591, 601, 606, 611, 616, 621, 626, 631, 636, 643, 653, 661, 671, 681, 691, 701, 711, 721, 731, 741, 753, 763, 771, 776, 781, 786, 791, 796, 801, 805, 807, or 809, or any one of 36-41, 48-72, or 88-97, and VD2 comprises three CDRs from SEQ ID NO: 30, 32, 34, 108, 109, 110, 111, 112, 113, 114, 115, 121-317, 527-534, 543, 553, 563, 573, 583, 593, 603, 608, 613, 618, 623, 628, 633, 638, 641, 651, 663, 673, 683, 693, 703, 713, 723, 733, 743, 751, 761, 773, 778, 783, 788, 793, 798, 803 or 811; or
(d) VD2 comprises three CDRs from SEQ ID NO: 541, 551, 561, 571, 581, 591, 601, 606, 611, 616, 621, 626, 631, 636, 643, 653, 661, 671, 681, 691, 701, 711, 721, 731, 741, 753, 763, 771, 776, 781, 786, 791, 796, 801, 805, 807, or 809, or any one of 36-41, 48-72, or 88-97, and VD1 comprises three CDRs from SEQ ID NO: 30, 32, 34, 108, 109, 110, 111, 112, 113, 114, 115, 121-317, 527-534, 543, 553, 563, 573, 583, 593, 603, 608, 613, 618, 623, 628, 633, 638, 641, 651, 663, 673, 683, 693, 703, 713, 723, 733, 743, 751, 761, 773, 778, 783, 788, 793, 798, 803 or 811.

2. (canceled)

3. A binding protein capable of binding TNF, the binding protein comprising a polypeptide chain, wherein the polypeptide chain comprises VD1-(X1)n-VD2-C-(X2)n, wherein;
VD1 is a first light chain variable domain;
VD2 is a second light chain variable domain;
C is a light chain constant domain;
X1 is a linker with the proviso that it is not CH1;
X2 does not comprise an Fc region;
(X1)n, wherein n is 0 or 1;
(X2)n, wherein n is 0 or 1; and
wherein
(a) VD1 or VD2 comprises three CDRs from SEQ ID NO: 546, 556, 566, 576, 586, 596, 648, 658, 666, 676, 686, 696, 706, 716, 726, 736, 746, 758, 768 or any one of 42-47, 73-87, or 98-107;
(b) VD1 and VD2 independently comprise three CDRs from SEQ ID NO:546, 556, 566, 576, 586, 596, 648, 658, 666, 676, 686, 696, 706, 716, 726, 736, 746, 758, 768 or any one of 42-47, 73-87, or 98-107;
(c) VD1 comprises three CDRs from SEQ ID NO:546, 556, 566, 576, 586, 596, 648, 658, 666, 676, 686, 696, 706, 716, 726, 736, 746, 758, 768 or any one of 42-47, 73-87, or 98-107, and VD2 comprises three CDRs from SEQ ID NO: 31, 33, 35, 116, 117, 118, 119, 120, 318-526, 535-539, 548, 558, 568, 578, 588, 598, 646, 656, 668, 678, 688, 698, 708, 718, 728, 738, 748, 756, 766 or 812; or
(d) VD2 comprises three CDRs from SEQ ID NO:546, 556, 566, 576, 586, 596, 648, 658, 666, 676, 686, 696, 706, 716, 726, 736, 746, 758, 768 or any one of 42-47, 73-87, or 98-107, and VD1 comprises three CDRs from SEQ ID NO: 31, 33, 35, 116, 117, 118, 119, 120, 318-526, 535-539, 548, 558, 568, 578, 588, 598, 646, 656, 668, 678, 688, 698, 708, 718, 728, 738, 748, 756, 766 or 812.

4-5. (canceled)

6. A binding protein capable of binding TNF, the binding protein comprising first and second polypeptide chains, wherein the first polypeptide chain comprises a first VD1-(X1)n-VD2-C-(X2)n, wherein
VD1 is a first heavy chain variable domain;
VD2 is a second heavy chain variable domain;
C is a heavy chain constant domain;
X1 is a first linker;
X2 is an Fc region;
(X1)n, wherein n is 0 or 1;
(X2)n, wherein n is 0 or 1; and
wherein the second polypeptide chain comprises a second VD1-(X1)n-VD2-C-(X2)n, wherein
VD1 is a first light chain variable domain;
VD2 is a second light chain variable domain;
C is a light chain constant domain;
X1 is a second linker;
X2 does not comprise an Fc region;
(X1)n, wherein n is 0 or 1;
(X2)n, wherein n is 0 or 1; and
wherein the first and second X1 linker are the same or different;
wherein the first and/or second X1 linker is not CH1; and
wherein
(a) the VD1 or VD2 heavy chain variable domain comprises three CDRs from SEQ ID NO: 541, 551, 561, 571, 581, 591, 601, 606, 611, 616, 621, 626, 631, 636, 643, 653, 661, 671, 681, 691, 701, 711, 721, 731, 741, 753, 763, 771, 776, 781, 786, 791, 796, 801, 805, 807, 809, or any one of 36-41, 48-72, or 88-97, the VD1 or VD2 light chain variable domain comprises three CDRs from SEQ ID NO:546, 556, 566, 576, 586, 596, 648, 658, 666, 676, 686, 696, 706, 716, 726, 736, 746, 758, 768 or any one of 42-47, 73-87, or 98-107;
(b) the VD1 and VD2 heavy chain variable domains independently comprise three CDRs from SEQ ID NO:541, 551, 561, 571, 581, 591, 601, 606, 611, 616, 621, 626, 631, 636, 643, 653, 661, 671, 681, 691, 701, 711, 721, 731, 741, 753, 763, 771, 776, 781, 786, 791, 796, 801, 805, 807, 809, or any one of 36-41, 48-72, or 88-97, the VD1 and VD2 light chain variable domains independently comprise three CDRs from SEQ ID NO:546, 556, 566, 576, 586, 596, 648, 658, 666, 676, 686, 696, 706, 716, 726, 736, 746, 758, 768 or any one of 42-47, 73-87, or 98-107;
(c) the VD1 heavy chain variable domain comprises three CDRs from SEQ ID NO:541, 551, 561, 571, 581, 591, 601, 606, 611, 616, 621, 626, 631, 636, 643, 653, 661, 671, 681, 691, 701, 711, 721, 731, 741, 753, 763, 771, 776, 781, 786, 791, 796, 801, 805, 807, 809, or any one of 36-41, 48-72, or 88-97, and the VD2 heavy chain variable domain comprises three CDRs from SEQ ID NO:30, 32, 34, 108, 109, 110, 111, 112, 113, 114, 115, 121-317, 527-534, 543, 553, 563, 573, 583, 593, 603, 608, 613, 618, 623, 628, 633, 638, 641, 651, 663, 673, 683, 693, 703, 713, 723, 733, 743, 751, 761, 773, 778, 783, 788, 793, 798, 803 or 811; the VD1 light chain variable domain comprises three CDRs from SEQ ID NO:546, 556, 566, 576, 586, 596, 648, 658, 666, 676, 686, 696, 706, 716, 726, 736, 746, 758, 768 or any one of 42-47, 73-87, or 98-107, and the VD2 light chain variable domain comprises three CDRs from SEQ ID NO: 31, 33, 35, 116, 117, 118, 119, 120, 318-526, 535-539, 548, 558, 568, 578, 588, 598, 646, 656, 668, 678, 688, 698, 708, 718, 728, 738, 748, 756, 766, or 812; or
(d) the VD2 heavy chain variable domain comprises three CDRs from SEQ ID NO:541, 551, 561, 571, 581, 591, 601, 606, 611, 616, 621, 626, 631, 636, 643, 653, 661, 671, 681, 691, 701, 711, 721, 731, 741, 753, 763, 771, 776, 781, 786, 791, 796, 801, 805, 807, 809, or any one of 36-41, 48-72, or 88-97, and the VD1 heavy chain variable domain comprises three CDRs from SEQ ID NO:30, 32, 34, 108, 109, 110, 111, 112, 113, 114, 115, 121-317, 527-534, 543, 553, 563, 573, 583, 593, 603, 608, 613, 618, 623, 628, 633, 638, 641, 651, 663, 673, 683, 693, 703, 713, 723, 733, 743, 751, 761, 773, 778, 783, 788, 793, 798, 803 or 811; the VD2 light chain variable domain comprises three CDRs from SEQ ID NO:546, 556, 566, 576, 586, 596, 648, 658, 666, 676, 686, 696, 706, 716, 726, 736, 746, 758, 768 or any one of 42-47, 73-87, or 98-107, and the VD1 light chain variable domain comprises three CDRs from SEQ ID NO: 31, 33, 35, 116, 117, 118, 119, 120, 318-526, 535-539, 548, 558, 568, 578, 588, 598, 646, 656, 668, 678, 688, 698, 708, 718, 728, 738, 748, 756, 766 or 812.

7. (canceled)

8. The binding protein of claim 1, wherein X1 comprises any one of SEQ ID NOs 1-29.

9-18. (canceled)

19. A binding protein capable of binding TNF and IL-17, the binding protein comprising four polypeptide chains, wherein two polypeptide chains comprise VD1-(X1)n-VD2-C-(X2)n, wherein
VD1 is a first heavy chain variable domain;
VD2 is a second heavy chain variable domain;
C is a heavy chain constant domain;
X1 is a first linker;
X2 is an Fc region; and
wherein two polypeptide chains comprise VD1-(X1)n-VD2-C-(X2)n, wherein
VD1 is a first light chain variable domain;
VD2 is a second light chain variable domain;
C is a light chain constant domain;
X1 is a second linker;
X2 does not comprise an Fc region;
(X1)n, wherein n is 0 or 1; and
(X2)n, wherein n is 0 or 1;
wherein the first and second X1 linker are the same or different;
wherein the first and/or second X1 linker is not CH1; and
wherein
(a) the VD1 or VD2 heavy chain variable domain comprises three CDRs from SEQ ID NO: 541, 551, 561, 571, 581, 591, 601, 606, 611, 616, 621, 626, 631, 636, 643, 653, 661, 671, 681, 691, 701, 711, 721, 731, 741, 753, 763, 771, 776, 781, 786, 791, 796, 801, 805, 807, 809, or any one of 36-41, 48-72, or 88-97, the VD1 or VD2 light chain variable domain comprises three CDRs from SEQ ID NO: 546, 556, 566, 576, 586, 596, 648, 658, 666, 676, 686, 696, 706, 716, 726, 736, 746, 758, 768 or any one of 42-47, 73-87, or 98-107;
(b) the VD1 and VD2 heavy chain variable domains independently comprise three CDRs from SEQ ID NO: 541, 551, 561, 571, 581, 591, 601, 606, 611, 616, 621, 626, 631, 636, 643, 653, 661, 671, 681, 691, 701, 711, 721, 731, 741, 753, 763, 771, 776, 781, 786, 791, 796, 801, 805, 807, 809, or any one of 36-41, 48-72, or 88-97, the VD1 and VD2 light chain variable domains independently comprise three CDRs from SEQ ID NO: 546, 556, 566, 576, 586, 596, 648, 658, 666, 676, 686, 696, 706, 716, 726, 736, 746, 758, 768 or any one of 42-47, 73-87, or 98-107;
(c) the VD1 heavy chain variable domain comprises three CDRs from SEQ ID NO: 541, 551, 561, 571, 581, 591, 601, 606, 611, 616, 621, 626, 631, 636, 643, 653, 661, 671, 681, 691, 701, 711, 721, 731, 741, 753, 763, 771, 776, 781, 786, 791, 796, 801, 805, 807, 809, or any one of 36-41, 48-72, or 88-97, and the VD2 heavy chain variable domain comprises three CDRs from SEQ ID NO:30, 32, 34, 108, 109, 110, 111, 112, 113, 114, 115, 121-317, 527-534, 543, 553, 563, 573, 583, 593, 603, 608, 613, 618, 623, 628, 633, 638, 641, 651, 663, 673, 683, 693, 703, 713, 723, 733, 743, 751, 761, 773, 778, 783, 788, 793, 798, 803 or 811; the VD1 light chain variable domain comprises three CDRs from SEQ ID NO: 546, 556, 566, 576, 586, 596, 648, 658, 666, 676, 686, 696, 706, 716, 726, 736, 746, 758, 768 or any one of 42-47, 73-87, or 98-107, and the VD2 light chain variable domain comprises three CDRs from SEQ ID NO: 31, 33, 35, 116, 117, 118, 119, 120, 318-526, 535-539, 548, 558, 568, 578, 588, 598, 646, 656, 668, 678, 688, 698, 708, 718, 728, 738, 748, 756, 766, or 812; or
(d) the VD2 heavy chain variable domain comprises three CDRs from SEQ ID NO: 541, 551, 561, 571, 581, 591, 601, 606, 611, 616, 621, 626, 631, 636, 643, 653, 661, 671, 681, 691, 701, 711, 721, 731, 741, 753, 763, 771, 776, 781, 786, 791, 796, 801, 805, 807, 809, or any one of 36-41, 48-72, or 88-97, and the VD1 heavy chain variable domain comprises three CDRs from SEQ ID NO:30, 32, 34, 108, 109, 110, 111, 112, 113, 114, 115, 121-317, 527-534, 543, 553, 563, 573, 583, 593, 603, 608, 613, 618, 623, 628, 633, 638, 641, 651, 663, 673, 683, 693, 703, 713, 723, 733, 743, 751, 761, 773, 778, 783, 788, 793, 798, 803 or 811; the VD2 light chain variable domain comprises three CDRs from SEQ ID NO: 546, 556, 566, 576, 586, 596, 648, 658, 666, 676, 686, 696, 706, 716, 726, 736, 746, 758, 768 or any one of 42-47, 73-87, or 98-107, and the VD1 light chain variable domain comprises three CDRs from SEQ ID NO: 31, 33, 35, 116, 117, 118, 119, 120, 318-526, 535-539, 548, 558, 568, 578, 588, 598, 646, 656, 668, 678, 688, 698, 708, 718, 728, 738, 748, 756, 766 or 812.

20-26. (canceled)

27. An isolated nucleic acid encoding a binding protein amino acid sequence of claim 1.

28. A vector comprising an isolated nucleic acid of claim 27.

29. (canceled)

30. A host cell comprising a vector of claim 28.

31-33. (canceled)

34. A method of producing a binding protein capable of binding TNF, the method comprising the step of culturing a host cell described in claim 30 in culture medium under conditions sufficient to produce the binding protein.

35. (canceled)

36. A pharmaceutical composition comprising the binding protein of claim 1 and a pharmaceutically acceptable carrier.

37-38. (canceled)

39. A method of treating a subject mammal for a disease or a disorder by administering to the mammal an effective amount of the pharmaceutical composition of claim 36 such that treatment is achieved.

40-72. (canceled)

73. An isolated nucleic acid encoding a binding protein comprising the amino acid sequence of claim 3.

74. A vector comprising the isolated nucleic acid of claim 73.

75. A host cell comprising the vector of claim 74.

76. A method for producing a protein capable of binding TNF, the method comprising the step of culturing the host cell of claim 75 in a culture medium under conditions sufficient to produce the binding protein.

77. A pharmaceutical composition comprising the binding protein of claim 3, and a pharmaceutically acceptable carrier.

78. A method for treating a mammal for a disease or disorder comprising administering to the mammal an effective amount of the pharmaceutical composition of claim 77.

79-88. (canceled)

89. An isolated nucleic acid encoding a binding protein comprising the amino acid sequence of claim 6.

90. A vector comprising the isolated nucleic acid of claim 89.

91. A host cell comprising the vector of claim 90.

92. A method for producing a protein capable of binding TNF, the method comprising the step of culturing the host cell of claim 91 in a culture medium under conditions sufficient to produce the binding protein.

93. A pharmaceutical composition comprising the binding protein of claim 6, and a pharmaceutically acceptable carrier.

94. A method for treating a mammal for a disease or disorder comprising administering to the mammal an effective amount of the pharmaceutical composition of claim 93.

95. An isolated nucleic acid encoding a binding protein comprising the amino acid sequence of claim 19.

96. A vector comprising the isolated nucleic acid of claim 95.

97. A host cell comprising the vector of claim 96.

98. A method for producing a protein capable of binding TNF and IL-17, the method comprising the step of culturing the host cell of claim 97 in a culture medium under conditions sufficient to produce the binding protein.

99. A pharmaceutical composition comprising the binding protein of claim 19, and a pharmaceutically acceptable carrier.

100. A method for treating a mammal for a disease or disorder comprising administering the mammal an effective amount of the pharmaceutical composition of claim 99.

101. The binding protein of claim 19, wherein X1 comprises any of SEQ ID NOs 1-29.

The application's sequence listing, which the Patent Office published only in electronic form, follows.

SEQUENCE LISTING (812 sequences)

SEQ ID NO: 1 - protein, 16 aa, Artificial Sequence
  source: /note="Description of Artificial Sequence: Synthetic peptide"
AKTTPKLEEGEFSEAR

SEQ ID NO: 2 - protein, 17 aa, Artificial Sequence
  source: /note="Description of Artificial Sequence: Synthetic peptide"
AKTTPKLEEGEFSEARV

SEQ ID NO: 3 - protein, 9 aa, Artificial Sequence
  source: /note="Description of Artificial Sequence: Synthetic peptide"
AKTTPKLGG

SEQ ID NO: 4 - protein, 10 aa, Artificial Sequence
  source: /note="Description of Artificial Sequence: Synthetic peptide"
SAKTTPKLGG

SEQ ID NO: 5 - protein, 6 aa, Artificial Sequence
  source: /note="Description of Artificial Sequence: Synthetic peptide"
SAKTTP

SEQ ID NO: 6 - protein, 6 aa, Artificial Sequence
  source: /note="Description of Artificial Sequence: Synthetic peptide"
RADAAP

SEQ ID NO: 7 - protein, 9 aa, Artificial Sequence
  source: /note="Description of Artificial Sequence: Synthetic peptide"
RADAAPTVS

SEQ ID NO: 8 - protein, 12 aa, Artificial Sequence
  source: /note="Description of Artificial Sequence: Synthetic peptide"
RADAAAAGGPGS

SEQ ID NO: 9 - protein, 27 aa, Artificial Sequence
  source: /note="Description of Artificial Sequence: Synthetic peptide"
RADAAAAGGGGSGGGGSGGGGSGGGGS

SEQ ID NO: 10 - protein, 18 aa, Artificial Sequence
  source: /note="Description of Artificial Sequence: Synthetic peptide"
SAKTTPKLEEGEFSEARV

SEQ ID NO: 11 - protein, 5 aa, Artificial Sequence
  source: /note="Description of Artificial Sequence: Synthetic peptide"
ADAAP

SEQ ID NO: 12 - protein, 12 aa, Artificial Sequence
  source: /note="Description of Artificial Sequence: Synthetic peptide"
ADAAPTVSIFPP

SEQ ID NO: 13 - protein, 5 aa, Artificial Sequence
  source: /note="Description of Artificial Sequence: Synthetic peptide"
TVAAP

SEQ ID NO: 14 - protein, 12 aa, Artificial Sequence
  source: /note="Description of Artificial Sequence: Synthetic peptide"
TVAAPSVFIFPP

SEQ ID NO: 15 - protein, 6 aa, Artificial Sequence
  source: /note="Description of Artificial Sequence: Synthetic peptide"
QPKAAP

SEQ ID NO: 16 - protein, 13 aa, Artificial Sequence
  source: /note="Description of Artificial Sequence: Synthetic peptide"
QPKAAPSVTLFPP

SEQ ID NO: 17 - protein, 6 aa, Artificial Sequence
  source: /note="Description of Artificial Sequence: Synthetic peptide"
AKTTPP

SEQ ID NO: 18 - protein, 13 aa, Artificial Sequence
  source: /note="Description of Artificial Sequence: Synthetic peptide"
AKTTPPSVTPLAP

SEQ ID NO: 19 - protein, 6 aa, Artificial Sequence
  source: /note="Description of Artificial Sequence: Synthetic peptide"
AKTTAP

SEQ ID NO: 20 - protein, 13 aa, Artificial Sequence
  source: /note="Description of Artificial Sequence: Synthetic peptide"
AKTTAPSVYPLAP

SEQ ID NO: 21 - protein, 6 aa, Artificial Sequence
  source: /note="Description of Artificial Sequence: Synthetic peptide"
ASTKGP

SEQ ID NO: 22 - protein, 13 aa, Artificial Sequence
  source: /note="Description of Artificial Sequence: Synthetic peptide"
ASTKGPSVFPLAP

SEQ ID NO: 23 - protein, 15 aa, Artificial Sequence
  source: /note="Description of Artificial Sequence: Synthetic peptide"
GGGGSGGGGSGGGGS

SEQ ID NO: 24 - protein, 15 aa, Artificial Sequence
  source: /note="Description of Artificial Sequence: Synthetic peptide"
GENKVEYAPALMALS

SEQ ID NO: 25 - protein, 15 aa, Artificial Sequence
  source: /note="Description of Artificial Sequence: Synthetic peptide"
GPAKELTPLKEAKVS

SEQ ID NO: 26 - protein, 15 aa, Artificial Sequence
  source: /note="Description of Artificial Sequence: Synthetic peptide"
GHEAAAVMQVQYPAS

SEQ ID NO: 27 - protein, 24 aa, Artificial Sequence
  source: /note="Description of Artificial Sequence: Synthetic peptide"
TVAAPSVFIFPPTVAAPSVFIFPP

SEQ ID NO: 28 - protein, 26 aa, Artificial Sequence
  source: /note="Description of Artificial Sequence: Synthetic peptide"
ASTKGPSVFPLAPASTKGPSVFPLAP

SEQ ID NO: 29 - protein, 5 aa, Artificial Sequence
  source: /note="Description of Artificial Sequence: Synthetic peptide"
GGGGS

SEQ ID NO: 30 - protein, 121 aa, Artificial Sequence
  source: /note="Description of Artificial Sequence: Synthetic polypeptide"
EVQLVQSGAEVKKPGSSVKVSCKASGYTFTDYEIHWVRQAPGQGLEWMGVNDPESGGTFYNQKFDGRVTLTADESTSTAYMELSSLRSEDTAVYYCTRYSKWDSFDGMDYWGQGTTVTVSS

SEQ ID NO: 31 - protein, 108 aa, Artificial Sequence
  source: /note="Description of Artificial Sequence: Synthetic polypeptide"
DIQMTQSPSSLSASVGDRVTITCRASSGIISYIDWFQQKPGKAPKRLIYATFDLASGVPSRFSGSGSGTDYTLTISSLQPEDFATYYCRQVGSYPETFGQGTKLEIKR

SEQ ID NO: 32 - protein, 126 aa, Artificial Sequence
  source: /note="Description of Artificial Sequence: Synthetic polypeptide"
EVQLVQSGAEVKKPGSSVKVSCKASGGSFGGYGIGWVRQAPGQGLEWMGGITPFFGFADYAQKFQGRVTITADESTTTAYMELSGLTSDDTAVYYCARDPNEFWNGYYSTHDFDSWGQGTTVTVSS

SEQ ID NO: 33 - protein, 108 aa, Artificial Sequence
  source: /note="Description of Artificial Sequence: Synthetic polypeptide"
EIVLTQSPDFQSVTPKEKVTITCRASQDIGSELHWYQQKPDQPPKLLIKYASHSTSGVPSRFSGSGSGTDFTLTINGLEAEDAGTYYCHQTDSLPYTFGPGTKVDIKR

SEQ ID NO: 34 - protein, 126 aa, Artificial Sequence
  source: /note="Description of Artificial Sequence: Synthetic polypeptide"
EVQLVQSGAEVKKPGESVKISCKASGGSFRSYGISWVRQAPGQGLEWMGGITHFFGITDYAQKFQGRVTITADESTTTAYMELSGLTSDDTAVYYCAREPNDFWNGYYDTHDFDSWGQGTTVTVSS

SEQ ID NO: 35 - protein, 108 aa, Artificial Sequence
  source: /note="Description of Artificial Sequence: Synthetic polypeptide"
EIVLTQSPDFQSVTPKEKVTITCRASQNIGSELHWYQQKPDQSPKLLIKYASHSISGVPSRFSGSGSGTDFTLTINGLEAEDAATYYCHQSDTLPHTFGQGTKVDIKR

SEQ ID NO: 36 - protein, 117 aa, Homo sapiens
EVQLVQSGAEVKKPGASVKVSCKASGYTFTSYDVNWVRQATGQGLEWMGWMNPNSGNTGYAQKFQGRVTITADESTSTAYMELSSLRSEDTAVYYCAIFDSDYMDVWGKGTLVTVSS

SEQ ID NO: 37 - protein, 120 aa, Homo sapiens
EVQLVQSGAEVKKPGSSAKVSCKASGGTFSSYAISWVRQAPGQGLEWMGGIIPILGTANYAQKFLGRVTITADESTSTVYMELSSLRSEDTAVYYCARGLYYDPTRADYWGQGTLVTVSS

SEQ ID NO: 38 - protein, 126 aa, Homo sapiens
EVQLVESGGGLVQPGGSLRLSCATSGFTFNNYWMSWVRQAPGKGLEWVANINHDESEKYYVDSAKGRFTISRDNAEKSLFLQMNSLRAEDTAVYYCARIIRGRVGFDYYNYAMDVWGQGTLVTVSS

SEQ ID NO: 39 - protein, 124 aa, Homo sapiens
EVQLVQSGAEVKKPGASVKVSCKTSGYTFSNYDINWVRQPTGQGLEWMGWMDPNNGNTGYAQKFVGRVTMTRDTSKTTAYLELSGLKSEDTAVYYCARSSGSGGTWYKEYFQSWGQGTMVTVSS

SEQ ID NO: 40 - protein, 115 aa, Homo sapiens
EVQLVQSGAEVKKPGASVKVSCKTSGYSLTQYPIHWVRQAPGQRPEWMGWISPGNGNTKLSPKFQGRVTLSRDASAGTVFMDLSGLTSDDTAVYFCTSVDLGDHWGQGTLVTVSS

SEQ ID NO: 41 - protein, 113 aa, Homo sapiens
EVQLVESGGGLVQPGRSLRLSCAASGFTFDDYPMHWVRQAPGEGLEWVSGISSNSASIGYADSVKGRFTISRDNAQNTLYLQMNSLGDEDTAVYYCVSLTLGIGQGTLVTVSS

SEQ ID NO: 42 - protein, 108 aa, Homo sapiens
SYELTQPPSVSLSPGQTARITCSGDALPKQYAYWYQQKPGQAPVLVIYKDTERPSGIPERFSGSSSGTTVTLTISGAQAEDEADYYCQSADSSGTSWVFGGGTKLTVL

SEQ ID NO: 43 - protein, 108 aa, Homo sapiens
DIVMTQSPDFHSVTPKEKVTITCRASQSIGSSLHWYQQKPDQSPKLLIRHASQSISGVPSRFSGSGSGTDFTLTIHSLEAEDAATYYCHQSSSSPPPTFGQGTQVEIK

SEQ ID NO: 44 - protein, 105 aa, Homo sapiens
DIRLTQSPSPLSASVGDRVTITCRASQSIGNYLNWYQHKPGKAPKLLIYAASSLQSGVPSRFSGTGSGTDFTLTISSLQPEDFATYYCQESYSLIFAGGTKVEIK

SEQ ID NO: 45 - protein, 113 aa, Homo sapiens
DIVMTQSPLSLPVTPGEPASISCRSSQSLLHSNGYNYLDWYLQKPGQFPQLLIYLGSYRASGVPDRFSGSGSGTDFTLKISRVEAEDVGVYYCMQRIEFPPGTFGQGTKLGIK

SEQ ID NO: 46 - protein, 107 aa, Homo sapiens
DIVMTQSPEFQSVTPKEKVTITCRASQSIGSSLHWYQQKPDQSPKLLINYASQSFSGVPSRFSGGGSGTDFTLTINSLEAEDAATYYCHQSSNLPITFGQGTRLEIK

SEQ ID NO: 47 - protein, 107 aa, Homo sapiens
DIRLTQSPSSLSASVGDRVTITCRASQSIGNYLHWYQQKPGKAPKLLIYAASSLQSGVPSRFSGSGSGTDFTLTISSLQPEDFATYYCQQSYSTLYSFGQGTKLEIK

SEQ ID NO: 48 - protein, 117 aa, Artificial Sequence
  source: /note="Description of Artificial Sequence: Synthetic polypeptide"
EVQLVESGGGLVQPGGSLRLSCAASGFTFSNYGVNWVRQAPGKGLEWVSMIAADGFTDYASSVKGRFTISRDNSKNTLYLQMNSLRAEDTAVYYCAREWHHGPVAYWGQGTLVTVSS

SEQ ID NO: 49 - protein, 117 aa, Artificial Sequence
  source: /note="Description of Artificial Sequence: Synthetic polypeptide"
EVQLVESGGGLVQPGGSLRLSCAASGFTFSNYGVSWVRQAPGKGLEWVSLIRGDGSTDYASSLKGRFTISRDNSKNTLYLQMNSLRAEDTAVYYCAREWHHGPVAYWGQGTLVTVSS

SEQ ID NO: 50 - protein, 117 aa, Artificial Sequence
  source: /note="Description of Artificial Sequence: Synthetic polypeptide"
EVQLVESGGGLVQPGGSLRLSCAASGFTFSNYGVSWVRQAPGKGLEWVSMIWADGSTHYADTLKSRFTISRDNSKNTLYLQMNSLRAEDTAVYYCAREWQHGPVAYWGQGTLVTVSS

SEQ ID NO: 51 - protein, 117 aa, Artificial Sequence
  source: /note="Description of Artificial Sequence: Synthetic polypeptide"
EVQLVESGGGLVQPGGSLRLSCAASGFTFSNYGVTWVRQAPGKGLEWVSMIWADGSTDYADTVKGRFTISRDNSKNTLYLQMNSLRAEDTAVYYCAREWQHGPVAYWGQGTLVTVSS

SEQ ID NO: 52 - protein, 117 aa, Artificial Sequence
  source: /note="Description of Artificial Sequence: Synthetic polypeptide"
EVQLVESGGGLVQPGGSLRLSCAASGFTFSNYGVTWVRQAPGKGLEWVSMIWADGSTHYADSVKSRFTISRDNSKNTLYLQMNSLRAEDTAVYYCAREWQHGPLAYWGQGTLVTVSS

SEQ ID NO: 53 - protein, 117 aa, Artificial Sequence
  source: /note="Description of Artificial Sequence: Synthetic polypeptide"
EVQLVESGGGLVQPGGSLRLSCAASGFTFSNYGVTWVRQAPGKGLEWVSMIWSDGSTDYASSVKGRFTISRDNSKNTLYLQMNSLRAEDTAVYYCAREWQHGPVAYWGQGTLVTVSS

SEQ ID NO: 54 - protein, 117 aa, Artificial Sequence
  source: /note="Description of Artificial Sequence: Synthetic polypeptide"
EVQLVESGGGLVQPGGSLRLSCAASGFTFSNYGVTWVRQAPGKGLEWVSMIWADGSTHYASSLKGRFTISRDNSKNTLYLQMNSLRAEDTAVYYCAREWQHGPAAYWGQGTLVTVSS

SEQ ID NO: 55 - protein, 117 aa, Artificial Sequence
  source: /note="Description of Artificial Sequence: Synthetic polypeptide"
EVQLVESGGGLVQPGGSLRLSCAASGFTFSNYGVSWVRQAPGKGLEWVSMIWADGSTHYASSLKGRFTISRDNSKNTLYLQMNSLRAEDTAVYYCAREWQHGPVAYWGQGTLVTVSS

SEQ ID NO: 56 - protein, 117 aa, Artificial Sequence
  source: /note="Description of Artificial Sequence: Synthetic polypeptide"
EVQLVESGGGLVQPGGSLRLSCAASGFTFSNYGVTWVRQAPGKGLEWVSMIWADGSTHYASSVKGRFTISRDNSKNTLYLQMNSLRAEDTAVYYCAREWQHGPAAYWGQGTLVTVSS

SEQ ID NO: 57 - protein, 117 aa, Artificial Sequence
  source: /note="Description of Artificial Sequence: Synthetic polypeptide"
EVQLVESGGGLVQPGGSLRLSCAASGFTFSNYGVTWVRQAPGKGLEWVSMIWADGSTHYASSVKGRFTISRDNSKNTLYLQMNSLRAEDTAVYYCAREWQHGPSAYWGQGTLVTVSS

SEQ ID NO: 58 - protein, 117 aa, Artificial Sequence
  source: /note="Description of Artificial Sequence: Synthetic polypeptide"
EVQLVESGGGLVQPGGSLRLSCAASGFTFSNYGVTWVRQAPGKGLEWVSMIWADGSTHYASSVKGRFTISRDNSKNTLYLQMNSLRAEDTAVYYCAREWQHGPVAYWGQGTLVTVSS

SEQ ID NO: 59 - protein, 117 aa, Artificial Sequence
  source: /note="Description of Artificial Sequence: Synthetic polypeptide"
EVQLVESGGGLVQPGGSLRLSCAASGFTFSNYGVEWVRQAPGKGLEWVSGIWADGSTHYADTVKSRFTISRDNSKNTLYLQMNSLRAEDTAVYYCAREWQHGPVAYWGQGTLVTVSS

SEQ ID NO: 60 - protein, 117 aa, Artificial Sequence
  source: /note="Description of Artificial Sequence: Synthetic polypeptide"
EVQLVESGGGLVQPGGSLRLSCAASGFTFSNYGVEWVRQAPGKGLEWVSGIWADGSTHYADTVKSRFTISRDNSKNTLYLQMNSLRAEDTAVYYCAREWQHGPVGYWGQGTLVTVSS

SEQ ID NO: 61 - protein, 117 aa, Artificial Sequence; identical to SEQ ID NO: 60
  source: /note="Description of Artificial Sequence: Synthetic polypeptide"

SEQ ID NO: 62 - protein, 117 aa, Artificial Sequence
  source: /note="Description of Artificial Sequence: Synthetic polypeptide"
EVQLVESGGGLVQPGGSLRLSCAASGFTFSNYGVTWVRQAPGKGLEWVSMIWADGSTDYASTVKGRFTISRDNSKNTLYLQMNSLRAEDTAVYYCAREWQHGPVGYWGQGTLVTVSS

SEQ ID NO: 63 - protein, 117 aa, Artificial Sequence; identical to SEQ ID NO: 58
  source: /note="Description of Artificial Sequence: Synthetic polypeptide"

SEQ ID NO: 64 - protein, 117 aa, Artificial Sequence; identical to SEQ ID NO: 52
  source: /note="Description of Artificial Sequence: Synthetic polypeptide"

SEQ ID NO: 65 - protein, 117 aa, Artificial Sequence
  source: /note="Description of Artificial Sequence: Synthetic polypeptide"
EVQLVESGGGLVQPGGSLRLSCAASGFTFSNYGVQWVRQAPGKGLEWVSGIGADGSTAYASSLKGRFTISRDNSKNTLYLQMNSLRAEDTAVYYCAREWQHSGLAYWGQGTLVTVSS

SEQ ID NO: 66 - protein, 117 aa, Artificial Sequence
  source: /note="Description of Artificial Sequence: Synthetic polypeptide"
EVQLVESGGGLVQPGGSLRLSCAASGFTFSNYGVSWVRQAPGKGLEWVSMIWADGSTHYADTVKGRFTISRDNSKNTLYLQMNSLRAEDTAVYYCAREWQHGPLAYWGQGTLVTVSS

SEQ ID NO: 67 - protein, 117 aa, Artificial Sequence
  source: /note="Description of Artificial Sequence: Synthetic polypeptide"
EVQLVESGGGLVQPGGSLRLSCAASGFTFSNYGVTWVRQAPGKGLEWVSMIWADGSTHYADTVKGRFTISRDNSKNTLYLQMNSLRAEDTAVYYCAREWQHGPLAYWGQGTLVTVSS

SEQ ID NO: 68 - protein, 117 aa, Artificial Sequence; identical to SEQ ID NO: 58
  source: /note="Description of Artificial Sequence: Synthetic polypeptide"

SEQ ID NO: 69 - protein, 117 aa, Artificial Sequence; identical to SEQ ID NO: 58
  source: /note="Description of Artificial Sequence: Synthetic polypeptide"

SEQ ID NO: 70 - protein, 117 aa, Artificial Sequence; identical to SEQ ID NO: 58
  source: /note="Description of Artificial Sequence: Synthetic polypeptide"

SEQ ID NO: 71 - protein, 117 aa, Artificial Sequence; identical to SEQ ID NO: 58
  source: /note="Description of Artificial Sequence: Synthetic polypeptide"

SEQ ID NO: 72 - protein, 117 aa, Artificial Sequence; identical to SEQ ID NO: 58
  source: /note="Description of Artificial Sequence: Synthetic polypeptide"

SEQ ID NO: 73 - protein, 108 aa, Artificial Sequence
  source: /note="Description of Artificial Sequence: Synthetic polypeptide"
DIQMTQSPSSLSASVGDRVTITCKASQAVSSAVAWYQQKPGKAPKLLIYWASTRHTGVPSRFSGSGSGTDFTLTISSLQPEDFATYYCQQHYSTPFTFGQGTKLEIKR

SEQ ID NO: 74 - protein, 108 aa, Artificial Sequence
  source: /note="Description of Artificial Sequence: Synthetic polypeptide"
DIQMTQSPSSLSASVGDRVTITCRASQLVSSAVAWYQQKPGKAPKLLIYWASTLHTGVPSRFSGSGSGTDFTLTISSLQPEDFATYYCQQHYRTPFTFGQGTKLEIKR

SEQ ID NO: 75 - protein, 108 aa, Artificial Sequence
  source: /note="Description of Artificial Sequence: Synthetic polypeptide"
DIQMTQSPSSLSASVGDRVTITCRASQLVSSAVAWYQQKPGKAPKLLIYWASTRHSGVPSRFSGSGSGTDFTLTISSLQPEDFATYYCQQHYRTPFSFGQGTKLEIKR

SEQ ID NO: 76 - protein, 108 aa, Artificial Sequence
  source: /note="Description of Artificial Sequence: Synthetic polypeptide"
DIQMTQSPSSLSASVGDRVTITCRASQLVSSAVAWYQQKPGKAPKLLIYWASTRHSGVPSRFSGSGSGTDFTLTISSLQPEDFATYYCQQHYRTPFTFGQGTKLEIKR

SEQ ID NO: 77 - protein, 108 aa, Artificial Sequence
  source: /note="Description of Artificial Sequence: Synthetic polypeptide"
DIQMTQSPSSLSASVGDRVTITCRASQLVSSAVAWYQQKPGKAPKLLIYWASARHTGVPSRFSGSGSGTDFTLTISSLQPEDFATYYCQQHYKTPFSFGQGTKLEIKR

SEQ ID NO: 78 - protein, 108 aa, Artificial Sequence
  source: /note="Description of Artificial Sequence: Synthetic polypeptide"
DIQMTQSPSSLSASVGDRVTITCRASQLVSSAVAWYQQKPGKAPKLLIYWASARHTGVPSRFSGSGSGTDFTLTISSLQPEDFATYYCQQHYKTPFTFGQGTKLEIKR

SEQ ID NO: 79 - protein, 108 aa, Artificial Sequence
  source: /note="Description of Artificial Sequence: Synthetic polypeptide"
DIQMTQSPSSLSASVGDRVTITCRASQLVSSAVAWYQQKPGKAPKLLIYWASARHTGVPSRFSGSGSGTDFTLTISSLQPEDFATYYCQQHYRTPFTFGQGTKLEIKR

SEQ ID NO: 80 - protein, 108 aa, Artificial Sequence
  source: /note="Description of Artificial Sequence: Synthetic polypeptide"
DIQMTQSPSSLSASVGDRVTITCRASQLVSSAVAWYQQKPGKAPKLLIYWASTRHTGVPSRFSGSGSGTDFTLTISSLQPEDFATYYCQQHYRTPFTFGQGTKLEIKR

SEQ ID NO: 81 - protein, 108 aa, Artificial Sequence
  source: /note="Description of Artificial Sequence: Synthetic polypeptide"
DIQMTQSPSSLSASVGDRVTITCRASQGVSSALAWYQQKPGKAPKLLIYWASALHSGVPSRFSGSGSGTDFTLTISSLQPEDFATYYCQQHYSAPFTFGQGTKLEIKR

SEQ ID NO: 82 - protein, 108 aa, Artificial Sequence
  source: /note="Description of Artificial Sequence: Synthetic polypeptide"
DIQMTQSPSSLSASVGDRVTITCRASQLVSSAVAWYQQKPGKAPKLLIYWASTLHSGVPSRFSGSGSGTDFTLTISSLQPEDFATYYCQQHYSTPFTFGQGTKLEIKR

SEQ ID NO: 83 - protein, 108 aa, Artificial Sequence
  source: /note="Description of Artificial Sequence: Synthetic polypeptide"
DIQMTQSPSSLSASVGDRVTITCKASQLVSSAVAWYQQKPGKAPKLLIYWASTRHTGVPSRFSGSGSGTDFTLTISSLQPEDFATYYCQQHYSTPFTFGQGTKLEIKR

SEQ ID NO: 84 - protein, 108 aa, Artificial Sequence
  source: /note="Description of Artificial Sequence: Synthetic polypeptide"
DIQMTQSPSSLSASVGDRVTITCKASQLVSSAVAWYQQKPGKAPKLLIYWASTLHTGVPSRFSGSGSGTDFTLTISSLQPEDFATYYCQQHYRTPFTFGQGTKLEIKR

SEQ ID NO: 85 - protein, 108 aa, Artificial Sequence
  source: /note="Description of Artificial Sequence: Synthetic polypeptide"
DIQMTQSPSSLSASVGDRVTITCKASQKVSSALAWYQQKPGKAPKLLIYWASALHSGVPSRFSGSGSGTDFTLTISSLQPEDFATYYCQQHYRPPFTFGQGTKLEIKR

SEQ ID NO: 86 - protein, 108 aa, Artificial Sequence
  source: /note="Description of Artificial Sequence: Synthetic polypeptide"
DIQMTQSPSSLSASVGDRVTITCKASQLVSSAVAWYQQKPGKAPKLLIYWASALHTGVPSRFSGSGSGTDFTLTISSLQPEDFATYYCQQHYSSPYTFGQGTKLEIKR

SEQ ID NO: 87 - protein, 108 aa, Artificial Sequence; identical to SEQ ID NO: 84
  source: /note="Description of Artificial Sequence: Synthetic polypeptide"

SEQ ID NO: 88 - protein, 124 aa, Artificial Sequence
  source: /note="Description of Artificial Sequence: Synthetic polypeptide"
EVQLVQSGAEVKKPGASVKVSCKASGYTFANYGIIWVRQAPGQGLEWMGWINTYTGKPTYAQKFQGRVTMTTDTSTSTAYMELSSLRSEDTAVYYCARKLFTTMDVTDNAMDYWGQGTTVTVSS

SEQ ID NO: 89 - protein, 124 aa, Artificial Sequence
  source: /note="Description of Artificial Sequence: Synthetic polypeptide"
EVQLVQSGAEVKKPGASVKVSCKASGYTFNNYGIIWVRQAPGQGLEWMGWINTYTGKPTYAQKLQGRVTMTTDTSTSTAYMELSSLRSEDTAVYFCARKLFNTVDVTDNAMDYWGQGTTVTVSS

SEQ ID NO: 90 - protein, 124 aa, Artificial Sequence
  source: /note="Description of Artificial Sequence: Synthetic polypeptide"
EVQLVQSGAEVKKPGASVKVSCKASGYTFNNYGIIWVRQAPGQGLEWMGWINTYTGVPTYAQKFQGRVTMTTDTSTSTAYMELSSLRSEDTAVYYCARKLFNTVDVTDNAMDYWGQGTTVTVSS

SEQ ID NO: 91 - protein, 124 aa, Artificial Sequence
  source: /note="Description of Artificial Sequence: Synthetic polypeptide"
EVQLVQSGAEVKKPGASVKVSCKASGYTFNNYGIIWVRQAPGQGLEWMGWINTYTGKPTYAQKFQGRVTMTTDTSTSTAYMELSSLRSEDTAVYYCARKLFNTVAVTDNAMDYWGQGTTVTVSS

SEQ ID NO: 92 - protein, 124 aa, Artificial Sequence
  source: /note="Description of Artificial Sequence: Synthetic polypeptide"
EVQLVQSGAEVKKPGASVKVSCKASGYTFRNYGIIWVRQAPGQGLEWMGWINTYTGKPTYAQKFQGRVTMTTDTSTSTAYMELSSLRSEDTAVYFCARKLFTTVDVTDNAMDYWGQGTTVTVSS

SEQ ID NO: 93 - protein, 124 aa, Artificial Sequence
  source: /note="Description of Artificial Sequence: Synthetic polypeptide"
EVQLVQSGAEVKKPGASVKVSCKASGYTFNNYGINWVRQAPGQGLEWMGWINTYTGKPTYAQKFQGRVTMTTDTSTSTAYMELSSLRSEDTAVYFCARKFRNTVAVTDYAMDYWGQGTTVTVSS

SEQ ID NO: 94 - protein, 124 aa, Artificial Sequence
  source: /note="Description of Artificial Sequence: Synthetic polypeptide"
EVQLVQSGAEVKKPGASVKVSCKASGYTFRNYGITWVRQAPGQGLEWMGWINTYTGKPTYAQKFQGRVTMTTDTSTSTAYMELSSLRSEDTAVYFCARKLFTTMDVTDNAMDYWGQGTTVTVSS

SEQ ID NO: 95 - protein, 124 aa, Artificial Sequence; identical to SEQ ID NO: 88
  source: /note="Description of Artificial Sequence: Synthetic polypeptide"

SEQ ID NO: 96 - protein, 124 aa, Artificial Sequence
  source: /note="Description of Artificial Sequence: Synthetic polypeptide"
EVQLVQSGAEVKKPGASVKVSCKASGYTFSNYGINWVRQAPGQGLEWMGWINTYTGQPSYAQKFQGRVTMTTDTSTSTAYMELSSLRSEDTAVYYCARKLFKTEAVTDYAMDYWGQGTTVTVSS

SEQ ID NO: 97 - protein, 124 aa, Artificial Sequence
  source: /note="Description of Artificial Sequence: Synthetic polypeptide"
EVQLVQSGAEVKKPGASVKVSCKASGYTFNNYGIIWVRQAPGQGLEWMGWINTYSGKPTYAQKFQGRVTMTTDTSTSTAYMELSSLRSEDTAVYFCARKLFTTMDVTDNAMDYWGQGTTVTVSS

SEQ ID NO: 98 - protein, 107 aa, Artificial Sequence
  source: /note="Description of Artificial Sequence: Synthetic polypeptide"
DIQMTQSPSSLSASVGDRVTITCRASQDISQYLNWYQQKPGKAPKLLIYYTSRLQSGVPSRFSGSGSGTDFTLTISSLQPEDFATYFCQQGNTWPPTFGQGTKLEIK

SEQ ID NO: 99 - protein, 107 aa, Artificial Sequence
  source: /note="Description of Artificial Sequence: Synthetic polypeptide"
DIQMTQSPSSLSASVGDRVTITCRASQDISNYLNWYQQKPGKAPKLLIYYTSRLQSGVPSRFSGSGSGTDYTLTISSLQPEDFATYFCQQGNSWPPTFGQGTKLEIK

SEQ ID NO: 100 - protein, 107 aa, Artificial Sequence
  source: /note="Description of Artificial Sequence: Synthetic polypeptide"
DIQMTQSPSSLSASVGDRVTITCRASQDIYNYLNWYQQKPGKAPKLLIYYTSRLQSGVPSRFSGSGSGTDYTLTISSLQPEDFATYFCQQGNTQPPTFGQGTKLEIK

SEQ ID NO: 101 - protein, 107 aa, Artificial Sequence
  source: /note="Description of Artificial Sequence: Synthetic polypeptide"
DIQMTQSPSSLSASVGDRVTITCRASQDIENYLNWYQQKPGKAPKLLIYYTSRLQSGVPSRFSGSGSGTDFTLTISSLQPEDFATYFCQQGNTQPPTFGQGTKLEIK

SEQ ID NO: 102 - protein, 107 aa, Artificial Sequence
  source: /note="Description of Artificial Sequence: Synthetic polypeptide"
DIQMTQSPSSLSASVGDRVTITCRASQDISNYLNWYQQKPGKAPKLLIYYTSRLQSGVPSRFSGSGSGTDYTLTISSLQPEDFATYFCQQGNTWPPTFGQGTKLEIK

SEQ ID NO: 103 - protein, 107 aa, Artificial Sequence
  source: /note="Description of Artificial Sequence: Synthetic polypeptide"
DIQMTQSPSSLSASVGDRVTITCRASQDIYDVLNWYQQKPGKAPKLLIYYASRLQSGVPSRFSGSGSGTDFTLTISSLQPEDFATYYCQQGITLPPTFGQGTKLEIK

SEQ ID NO: 104 - protein, 107 aa, Artificial Sequence; identical to SEQ ID NO: 102
  source: /note="Description of Artificial Sequence: Synthetic polypeptide"

SEQ ID NO: 105 - protein, 107 aa, Artificial Sequence; identical to SEQ ID NO: 98
  source: /note="Description of Artificial Sequence: Synthetic polypeptide"

SEQ ID NO: 106 - protein, 107 aa, Artificial Sequence
  source: /note="Description of Artificial Sequence: Synthetic polypeptide"
DIQMTQSPSSLSASVGDRVTITCRASQNIYNVLNWYQQKPGKAPKLLIYYASRLQSGVPSRFSGSGSGTDFTLTISSLQPEDFATYFCQQGNTMPPTFGQGTKLEIK

SEQ ID NO: 107 - protein, 107 aa, Artificial Sequence
  source: /note="Description of Artificial Sequence: Synthetic polypeptide"
DIQMTQSPSSLSASVGDRVTITCRASQDISNFLNWYQQKPGKAPKLLIYYTSRLQSGVPSRFSGSGSGTDYTLTISSLQPEDFATYFCQQGNTQPPTFGQGTKLEIK

SEQ ID NO: 108 - protein, 121 aa, Artificial Sequence
  source: /note="Description of Artificial Sequence: Synthetic polypeptide"
EVQLVQSGAEVKKPGSSVKVSCKASGYTFTDYEIHWVRQAPGQGLEWIGVNDPESGGTFYNQKFDGRATLTADKSTSTAYMELSSLRSEDTAVYYCTRYYRYESFYGMDYWGQGTTVTVSS

SEQ ID NO: 109 - protein, 121 aa, Artificial Sequence
  source: /note="Description of Artificial Sequence: Synthetic polypeptide"
EVQLVQSGAEVKKPGSSVKVSCKASGYTFDDYEIHWVRQAPGQGLEWIGVNDPESGGTFYNQKFDGRATLTADKSTSTAYMELSSLRSEDTAVYYCTRYDKWDSFYGMDYWGQGTTVTVSS

SEQ ID NO: 110 - protein, 121 aa, Artificial Sequence; identical to SEQ ID NO: 30
  source: /note="Description of Artificial Sequence: Synthetic polypeptide"

SEQ ID NO: 111 - protein, 121 aa, Artificial Sequence
  source: /note="Description of Artificial Sequence: Synthetic polypeptide"
EVQLVQSGAEVKKPGSSVKVSCKASGYTFTDYEIHWVRQAPGQGLEWIGVNDPDSGGTLYNQKFDGRVTLTADESTSTAYMELSSLRSEDTAVYYCTRYDKWYSFEGMDIWGQGTTVTVSS

SEQ ID NO: 112 - protein, 121 aa, Artificial Sequence
  source: /note="Description of Artificial Sequence: Synthetic polypeptide"
EVQLVQSGAEVKKPGSSVKVSCKASGYTFTDYEIHWVRQAPGQGLEWIGVNDPESGGTFYNQKFDGRVTLSADESTSTAYMELSSLRSEDTAVYYCTRYDKYWSFEGMDYWGQGTTVTVSS

SEQ ID NO: 113 - protein, 121 aa, Artificial Sequence
  source: /note="Description of Artificial Sequence: Synthetic polypeptide"
EVQLVQSGAEVKKPGSSVKVSCKASGYTFSDYEIHWVRQAPGQGLEWMGVNDPESGGTFYNQKFDGRVTLTADESTSTAYMELSSLRSEDTAVYYCTRYDKWYSFEGMDIWGQGTTVTVSS

SEQ ID NO: 114 - protein, 121 aa, Artificial Sequence
  source: /note="Description of Artificial Sequence: Synthetic polypeptide"
EVQLVQSGAEVKKPGSSVKVSCKASGYTFSDYEIHWVRQAPGQGLEWMGVNDPESGGTFYNQKFDGRVTLTADESTSTAYMELSSLRSEDTAVYYCTRYDKYWSFEGMDYWGQGTTVTVSS

SEQ ID NO: 115 - protein, 121 aa, Artificial Sequence
  source: /note="Description of Artificial Sequence: Synthetic polypeptide"
EVQLVQSGAEVKKPGSSVKVSCKASGYTFTDYEIHWVRQAPGQGLEWMGVNDPESGGTFYNQKFDGRVTLTADESTSTAYMELSSLRSEDTAVYYCTRYDKWYSFEGMDIWGQGTTVTVSS

SEQ ID NO: 116 - protein, 107 aa, Artificial Sequence
  source: /note="Description of Artificial Sequence: Synthetic polypeptide"
DIQMTQSPSSLSASVGDRVTITCSASSGSISYIDWFQQKPGKAPKRLIYATFELASGVPSRFSGSGSGTDFTLTISSLQPEDFATYYCHQLGSYPDTFGQGTKLEIK

SEQ ID NO: 117 - protein, 107 aa, Artificial Sequence
  source: /note="Description of Artificial Sequence: Synthetic polypeptide"
DIQMTQSPSSLSASVGDRVTITCRASSGIISYIDWFQQKPGKAPKRLIYATFDLASGVPSRFSGSGSGTDYTLTISSLQPEDFATYYCRQVGSYPETFGQGTKLEIK

SEQ ID NO: 118 - protein, 107 aa, Artificial Sequence
  source: /note="Description of Artificial Sequence: Synthetic polypeptide"
DIQMTQSPSSLSASVGDRVTITCSASSGIISSIDWFQQKPGKAPKRLIYATFALQSGVPSRFSGSGSGTDFTLTISSLQPEDFATYYCSQMSSYPHTFGQGTKLEIK

SEQ ID NO: 119 - protein, 107 aa, Artificial Sequence
  source: /note="Description of Artificial Sequence: Synthetic polypeptide"
DIQMTQSPSSLSASVGDRVTITCSASSDISSYLNWFQQKPGKSPKRLIYRTSELQSGVPSRFSGSGSGTDFTLTISSLQPEDFATYYCQQWSSYPWTFGQGTKLEIK

SEQ ID NO: 120 - protein, 107 aa, Artificial Sequence
  source: /note="Description of Artificial Sequence: Synthetic polypeptide"
DIQMTQSPSSLSASVGDRVTITCSASQGIRSYIDWFQQKPGKSPKRLIYATFDLASGVPSRFSGSGSGTDYTLTISSLQPEDFATYYCRQVGNYPGTFGQGTKLEIK

SEQ ID NO: 121 - protein, 121 aa, Artificial Sequence
  source: /note="Description of Artificial Sequence: Synthetic polypeptide"
EVQLVQSGAEVKKPGSSVKVSCKASGYTFTDYEIHWVRQAPGQGLEWIGVNDPDSGGTFYNQKFDGRVTITADKSTSTAYMELSSLRSEDTAVYYCTRYYRYESFYGMDYWGQGTTVTVSS

SEQ ID NO: 122 - protein, 121 aa, Artificial Sequence
  source: /note="Description of Artificial Sequence: Synthetic polypeptide"
EVQLVQSGAEVKKPGSSVKVSCKASGYTFDDYEIHWVRQAPGQGLEWMGVIDPESGGTLYNQKFDGRVTLTADKSTSTAYMELSSLRSEDTAVYYCTRYYRYESFYGMDYWGQGTTVTVSS

SEQ ID NO: 123 - protein, 121 aa, Artificial Sequence
  source: /note="Description of Artificial Sequence: Synthetic polypeptide"
EVQLVQSGAEVKKPGSSVKVSCKASGYTFTDYEIHWVRQAPGQGLEWIGVNDPDSGGTLYNQKFDGRVTLTADKSTSTAYMELSSLRSEDTAVYYCTRYYRYESFYGMDYWGQGTTVTVSS

SEQ ID NO: 124 - protein, 121 aa, Artificial Sequence
  source: /note="Description of Artificial Sequence: Synthetic polypeptide"
EVQLVQSGAEVKKPGSSVKVSCKASGYTFTDYEIHWVRQAPGQGLEWMGVNDPDSGGTLYNQKFDGRVTITADESTSTAYMELSSLRSEDTAVYYCTRYYRYESFYGMDYWGQGTTVTVSS

SEQ ID NO: 125 - protein, 121 aa, Artificial Sequence
  source: /note="Description of Artificial Sequence: Synthetic polypeptide"
EVQLVQSGAEVKKPGSSVKVSCKASGYTFDDYEIHWVRQAPGQGLEWIGVNDPESGGTMYNQKFDGRVTITADKSTSTAYMELSSLRSEDTAVYYCTRYYRYESFYGMDYWGQGTTVTVSS

SEQ ID NO: 126 - protein, 121 aa, Artificial Sequence
  source: /note="Description of Artificial Sequence: Synthetic polypeptide"
EVQLVQSGAEVKKPGSSVKVSCKASGYTFDDYEIHWVRQAPGQGLEWIGVNDPESGGTFYNQKFDGRATLTADKSTSTAYMELSSLRSEDTAVYYCTRYYRYESFYGMDYWGQGTTVTVSS

SEQ ID NO: 127 - protein, 121 aa, Artificial Sequence
  source: /note="Description of Artificial Sequence: Synthetic polypeptide"
EVQLVQSGAEVKKPGSSVKVSCKASGYTFTDYEIHWVRQAPGQGLEWIGVNDPESGGTLYNQKFDGRVTLTADKSTSTAYMELSSLRSEDTAVYYCTRYYRYESFYGMDYWGQGTTVTVSS

SEQ ID NO: 128 - protein, 121 aa, Artificial Sequence
  source: /note="Description of Artificial Sequence: Synthetic polypeptide"
EVQLVQSGAEVKKPGSSVKVSCKASGYTFTDYEIHWVRQAPGQGLEWIGVNDPESGGTFYNQKFDGRATLTADESTSTAYMELSSLRSEDTAVYYCTRYYRYESFYGMDYWGQGTTVTVSS

SEQ ID NO: 129 - protein, 121 aa, Artificial Sequence; identical to SEQ ID NO: 108
  source: /note="Description of Artificial Sequence: Synthetic polypeptide"

SEQ ID NO: 130 - protein, 121 aa, Artificial Sequence
  source: /note="Description of Artificial Sequence: Synthetic polypeptide"
EVQLVQSGAEVRKPGSSVKVSCKASGYTFEDYEIHWVRQAPGQGLEWMGVIDPESGGTLYNQKFDGRVTLTADKSTSTAYMELSSLRSEDTAVYYCTRYYRYESFYGMDYWGQGTTVTVSS

SEQ ID NO: 131 - protein, 121 aa, Artificial Sequence
  source: /note="Description of Artificial Sequence: Synthetic polypeptide"
EVQLVQSGAEVKKPGSSVKVSCKASGYTFDDYEIHWVRQAPGQGLEWIGVNDPESGGTLYNQKFDGRVTLTADESTSTAYMELSSLRSEDTAVYYCTRYYRYESFYGMDYWGQGTTVTVSS

SEQ ID NO: 132 - protein, 121 aa, Artificial Sequence; identical to SEQ ID NO: 122
  source: /note="Description of Artificial Sequence: Synthetic polypeptide"

SEQ ID NO: 133 - protein, 121 aa, Artificial Sequence
  source: /note="Description of Artificial Sequence: Synthetic polypeptide"
EVQLVQSGAEVKKPGSSVKVSCKASGYTFDDYEIHWVRQAPGQGLEWMGVIDPESGGTLYNQKFDGRATLTADKSTSTAYMELSSLRSEDTAVYYCTRYYRYESFYGMDYWGQGTTVTVSS

SEQ ID NO: 134 - protein, 121 aa, Artificial Sequence
  source: /note="Description of Artificial Sequence: Synthetic polypeptide"
EVQLVQSGAEVKKPGSSVKVSCKASGYTFEDYEIHWVRQAPGQGLEWMGVIDPESGGTLYNQKFDGRVTLTADKSTSTAYMELSSLRSEDTAVYYCTRYYRYESFYGMDYWGQGTTVTVSS

SEQ ID NO: 135 - protein, 121 aa, Artificial Sequence
  source: /note="Description of Artificial Sequence: Synthetic polypeptide"
EVQLVQSGAEVKKPGSSVKVSCKASGYTFDDYEIHWVRQAPGQGLEWMGVNDPESGGTLYNQKFDGRVTITADKSTSTAYMELSSLRSEDTAVYYCTRYYRYESFYGMDYWGQGTTVTVSS

SEQ ID NO: 136 - protein, 121 aa, Artificial Sequence
  source: /note="Description of Artificial Sequence: Synthetic polypeptide"
EVQLVQSGAEVKKPGSSVKVSCKASGYTFTDYEIHWVRQAPGQGLEWMGVNDPESGGTLYNQKFDGRVTLTADKSTSTAYMELSSLRSEDTAVYYCTRYYRYESFHGMDYWGQGTTVTVSS

SEQ ID NO: 137 - protein, 121 aa, Artificial Sequence
  source: /note="Description of Artificial Sequence: Synthetic polypeptide"
EVQLVQSGAEVKKPGSSVKVSCKASGYTFADYEIHWVRQAPGQGLEWIGVNDPESGGTFYNQKFDGRATLTADKSTSTAYMELSSLRSEDTAVYYCTRYYRYESFYGMDYWGQGTTVTVSS

SEQ ID NO: 138 - protein, 121 aa, Artificial Sequence
  source: /note="Description of Artificial Sequence: Synthetic polypeptide"
EVQLVQSGAEVKKPGSSVKVSCKASGYTFDDYEIHWVRQAPGQGLEWMGVNDPDSGGTLYNQKFDGRVTITADKSTSTAYMELSSLRSEDTAVYYCTRYYRYESFYGMDYWGQGTTVTVSS

SEQ ID NO: 139 - protein, 121 aa, Artificial Sequence
  source: /note="Description of Artificial Sequence: Synthetic polypeptide"
EVQLVQSGAEVKKPGSSVKVSCKASGYTFSDYEIHWVRQAPGQGLEWIGVNDPESGGTLYNQKFDGRVTITADKSTSTAYMELSSLRSEDTAVYYCTRYYRYESFYGMDYWGQGTTVTVSS

SEQ ID NO: 140 - protein, 121 aa, Artificial Sequence
  source: /note="Description of Artificial Sequence: Synthetic polypeptide"
EVQLVQSGAEVKKPGSSVKVSCKASGYTFEDYEIHWVRQAPGQGLEWMGVIDPESGGTLYNQKFDGRATITADKSTSTAYMELSSLRSEDTAVYYCTRYYRYESFYGMDYWGQGTTVTVSS

SEQ ID NO: 141 - protein, 121 aa, Artificial Sequence
  source: /note="Description of Artificial Sequence: Synthetic polypeptide"
EVQLVQSGAEVKKPGSSVKVSCKASGYTFTDYEIHWVRQAPGQGLEWIGVNDPESGGTLYNQKFDGRVTITADKSTSTAYMELSSLRSEDTAVYYCTKYYRYESFYGMDYWGQGTTVTVSS

SEQ ID NO: 142 - protein, 121 aa, Artificial Sequence
  source: /note="Description of Artificial Sequence: Synthetic polypeptide"
EVQLVQSGAEVKKPGSSVKVSCKASGYTFTDYEIHWVRQAPGQGLEWIGVIDPESGGTLYNQKFDGRATITADESTSTAYMELSSLRSEDTAVYYCTRYYRYESFYGMDYWGQGTTVTVSS

SEQ ID NO: 143 - protein, 121 aa, Artificial Sequence
  source: /note="Description of Artificial Sequence: Synthetic polypeptide"
EVQLVQSGAEVKKPGSSVKVSCKASGYTFDDYEIHWVRQAPGQGLEWIGVNDPESGGTLYNQKFDGRATITADKSTSTAYMELSSLRSEDTAVYYCTRYYRYESFYGMDYWGQGTTVTVSS

SEQ ID NO: 144 - protein, 121 aa, Artificial Sequence
  source: /note="Description of Artificial Sequence: Synthetic polypeptide"
EVQLVQSGAEVKKPGSSVKVSCKASGYTFTEYEIHWVRQAPGQGLEWMGVNDPESGGSFYNQKFDGRVTLTADKSTSTAYMELSSLRSEDTAVYYCTRYYRYESFYGMDYWGQGTTVTVSS

SEQ ID NO: 145 - protein, 121 aa, Artificial Sequence
  source: /note="Description of Artificial Sequence: Synthetic polypeptide"
EVQLVQSGAEVKKPGSSVKVSCKASGYTFTDYEIHWVRQAPGQGLEWIGVNDPESGGTFYNQKFDGRVTLTADKSTSTAYMELSSLRSEDTAVYYCTRYYRYESFYGMDYWGQGTTVTVSS

SEQ ID NO: 146 - protein, 121 aa, Artificial Sequence
  source: /note="Description of Artificial Sequence: Synthetic polypeptide"
EVQLVQSGAEVKKPGSSVKVSCKASGYTFDDYEIHWVRQAPGQGLEWIGVIDPESGGSLYNQKFDGRVTITADKSTSTAYMELSSLRSEDTAVYYCTRYYRYESFYGMDYWGQGTTVTVSS

SEQ ID NO: 147 - protein, 121 aa, Artificial Sequence
  source: /note="Description of Artificial Sequence: Synthetic polypeptide"
EVQLVQSGAEVKKPGSSVKVSCKASGYTFDDYEIHWVRQAPGQGLEWMGVIDPESGGTLYNQKFDGRATITADKSTSTAYMELSSLRSEDTAVYYCTRYYRYESFYGMDYWGQGTTVTVSS

SEQ ID NO: 148 - protein, 121 aa, Artificial Sequence
  source: /note="Description of Artificial Sequence: Synthetic polypeptide"
EVQLVQSGAEVKKPGSSVKVSCKASGYTFDDYEIHWVRQAPGQGLEWIGVNDPESGGTLYNQKFDGRATLTADKSTSTAYMELSSLRSEDTAVYYCTRYYRYESFYGMDYWGQGTTVTVSS

SEQ ID NO: 149 - protein, 121 aa, Artificial Sequence
  source: /note="Description of Artificial Sequence: Synthetic polypeptide"
EVQLVQSGAEVKKPGSSVKVSCKASGYTFDDYEIHWVRQAPGQGLEWMGVIDPESGGSLYNQKFDGRVTLTADKSTSTAYMELSSLRSEDTAVYYCTRYYRYESFYGMDYWGQGTTVTVSS

SEQ ID NO: 150 - protein, 121 aa, Artificial Sequence
  source: /note="Description of Artificial Sequence: Synthetic polypeptide"
EVQLVQSGAEVKKPGSSVKVSCKASGYTFDDYEIHWVRQAPGQGLEWIGVNDPDSGGTLYNQKFDGRVTITADKSTSTAYMELSSLRSEDTAVYYCTRYYRYESFYGMDYWGQGTTVTVSS

SEQ ID NO: 151 - protein, 121 aa, Artificial Sequence
  source: /note="Description of Artificial Sequence: Synthetic polypeptide"
EVQLVQSGAEVKKPGSSVKVSCKASGYTFTDYEIHWVRQAPGQGLEWIGVNDPESGGILYNQKFDGRATLTADKSTSTAYMELSSLRSEDTAVYYCTRYYRYESFYGMDYWGQGTTVTVSS

SEQ ID NO: 152 - protein, 121 aa, Artificial Sequence
  source: /note="Description of Artificial Sequence: Synthetic polypeptide"
EVQLVQSGAEVKKPGSSVKVSCKASGYTFSDYEIHWVRQAPGQGLEWMGVNDPESGGTFYNQKFDGRVTLTADESTSTAYMELSSLRSEDTAVYYCTRYYRYESFYGMDYWGQGTTVTVSS

SEQ ID NO: 153 - protein, 121 aa, Artificial Sequence
  source: /note="Description of Artificial Sequence: Synthetic polypeptide"
EVQLVQSGAEVKKPGSSVKVSCKASGYTFDDYEIHWVRQAPGQGLEWIGVNDPESGGTLYNQKFDGRVTITADKSTSTAYMELSSLRSEDTAVYYCTRYYRYESFYGMDYWGQGTTVTVSS

SEQ ID NO: 154 - protein, 121 aa, Artificial Sequence
  source: /note="Description of Artificial Sequence: Synthetic polypeptide"
EVQLVQSGAEVKKPGSSVKVSCKASGYTFDEYEIHWVRQAPGQGLEWMGVIDPESGGTLYNQKFDGRVTLTADKSTSTAYMELSSLRSEDTAVYYCTRYYRYESFYGMDYWGQGTTVTVSS

SEQ ID NO: 155 - protein, 121 aa, Artificial Sequence
  source: /note="Description of Artificial Sequence: Synthetic polypeptide"
EVQLVQSGAEVKKPGSSVKVSCKASGYTFTDYEIHWVRQAPGQGLEWMGVNDPESGGTLYNQKFDGRVTLTADKSTSTAYMELSSLRSEDTAVYYCTRYYRYESFYGMDYWGQGTTVTVSS

SEQ ID NO: 156 - protein, 121 aa, Artificial Sequence
  source: /note="Description of Artificial Sequence: Synthetic polypeptide"
EVQLVQSGAEVKKPGSSVKVSCKASGYTFTDYEIHWVRQAPGQGLEWIGVIDPESGGTLYNQKFDGRVTLTADKSTSTAYMELSSLRSEDTAVYYCTRYYRYESFYGMDYWGQGTTVTVSS

SEQ ID NO: 157 - protein, 121 aa, Artificial Sequence
  source: /note="Description of Artificial Sequence: Synthetic polypeptide"
EVQLVQSGAEVKKPGSSVKVSCKASGYTFTDYEIHWVRQAPGQGLEWIGVNDPESGGTLYNQKFDGRATITADKSTSTAYMELSSLRSEDTAVYYCTRYYRYESFYGMDYWGQGTTVTVSS

SEQ ID NO: 158 - protein, 121 aa, Artificial Sequence
  source: /note="Description of Artificial Sequence: Synthetic polypeptide"
EVQLVQSGAEVKKPGSSVKVSCKASGYTFTDYEIHWVRQAPGQGLEWMGVIDPESGGSFYNQKFDGRATLTADKSTSTAYMELSSLRSEDTAVYYCTRYYRYESFYGMDYWGQGTTVTVSS

SEQ ID NO: 159 - protein, 121 aa, Artificial Sequence
  source: /note="Description of Artificial Sequence: Synthetic polypeptide"
EVQLVQSGAEVKKPGSSVKVSCKASGYTFTDYEIHWVRQAPGQGLEWMGVNDPESGGTLYNQKFDGRATITADKSTSTAYMELSSLRSEDTAVYYCTRYYRYESFYGMDYWGQGTTVTVSS

SEQ ID NO: 160 - protein, 121 aa, Artificial Sequence
  source: /note="Description of Artificial Sequence: Synthetic polypeptide"
EVQLVQSGAEVKKPGSSVKVSCKASGYTFDDYEIHWVRQAPGQGLEWIGVNDPESGGTLYNQKFDGRVTLTTDKSTSTAYMELSSLRSEDTAVYYCTRYYRYESFYGMDYWGQGTTVTVSS

SEQ ID NO: 161 - protein, 121 aa, Artificial Sequence
  source: /note="Description of Artificial Sequence: Synthetic polypeptide"
EVQLVQSGAEVKKPGSSVKVSCKASGYTFTDYEIHWVRQAPGQGLEWIGVNDPESGGTFYNQKFDGRATLTADKSTSTAYMELSSLRSEDTAVYYCTRYDKWYSFYGMDYWGQGTTVTVSS

SEQ ID NO: 162 - protein, 121 aa, Artificial Sequence
  source: /note="Description of Artificial Sequence: Synthetic polypeptide"
EVQLVQSGAEVKKPGSSVKVSCKASGYTFTDYEIHWVRQAPGQGLEWIGVNDPESGGTFYNQKFDGRATLTADKSTSTAYMELSSLRSEDTAVYYCTRYSKYWSFSGMDYWGQGTTVTVSS

SEQ ID NO: 163 - protein, 121 aa, Artificial Sequence
  source: /note="Description of Artificial Sequence: Synthetic polypeptide"
EVQLVQSGAEVKKPGSSVKVSCKASGYTFTDYEIHWVRQAPGQGLEWIGVNDPESGGTFYNQKFDGRATLTADKSTSTAYMELSSLRSEDTAVYYCTRYDKYFGFSGMDFWGQGTTVTVSS

SEQ ID NO: 164 - protein, 121 aa, Artificial Sequence
  source: /note="Description of Artificial Sequence: Synthetic polypeptide"
EVQLVQSGAEVKKPGSSVKVSCKASGYTFTDYEIHWVRQAPGQGLEWIGVNDPESGGTFYNQKFDGRATLTADKSTSTAYMELSSLRSEDTAVYYCTRYDKFDSFQGMDYWGQGTTVTVSS

SEQ ID NO: 165 - protein, 121 aa, Artificial Sequence
  source: /note="Description of Artificial Sequence: Synthetic polypeptide"
EVQLVQSGAEVKKPGSSVKVSCKASGYTFTDYEIHWVRQAPGQGLEWIGVNDPESGGTFYNQKFDGRATLTADKSTSTAYMELSSLRSEDTAVYYCTRYDKYEGFLGMDYWGQGTTVTVSS

SEQ ID NO: 166 - protein, 121 aa, Artificial Sequence
  source: /note="Description of Artificial Sequence: Synthetic polypeptide"
EVQLVQSGAEVKKPGSSVKVSCKASGYTFTDYEIHWVRQAPGQGLEWIGVNDPESGGTFYNQKFDGRATLTADKSTSTAYMELSSLRSEDTAVYYCTRYDKYWSFYGMDYWGQGTTVTVSS

SEQ ID NO: 167 - protein, 121 aa, Artificial Sequence
  source: /note="Description of Artificial Sequence: Synthetic polypeptide"
EVQLVQSGAEVKKPGSSVKVSCKASGYTFTDYEIHWVRQAPGQGLEWIGVNDPESGGTFYNQKFDGRATLTADKSTSTAYMELSSLRSEDTAVYYCTRYDKFESFNGMDYWGQGTTVTVSS

SEQ ID NO: 168 - protein, 121 aa, Artificial Sequence
  source: /note="Description of Artificial Sequence: Synthetic polypeptide"
EVQLVQSGAEVKKPGSSVKVSCKASGYTFTDYEIHWVRQAPGQGLEWIGVNDPESGGTFYNQKFDGRATLTADKSTSTAYMELSSLRSEDTAVYYCTRYDKYESFSGMDYWGQGTTVTVSS

SEQ ID NO: 169 - protein, 121 aa, Artificial Sequence
  source: /note="Description of Artificial Sequence: Synthetic polypeptide"
EVQLVQSGAEVKKPGSSVKVSCKASGYTFTDYEIHWVRQAPGQGLEWIGVNDPESGGTFYNQKFDGRATLTADKSTSTAYMELSSLRSEDTAVYYCTRYDKWEGFYGMDYWGQGTTVTVSS

SEQ ID NO: 170 - protein, 121 aa, Artificial Sequence
  source: /note="Description of Artificial Sequence: Synthetic polypeptide"
EVQLVQSGAEVKKPGSSVKVSCKASGYTFTDYEIHWVRQAPGQGLEWIGVNDPESGGTFYNQKFDGRATLTADKSTSTAYMELSSLRSEDTAVYYCTRYDKWESFYGMDFWGQGTTVTVSS

SEQ ID NO: 171 - protein, 121 aa, Artificial Sequence
  source: /note="Description of Artificial Sequence: Synthetic polypeptide"
EVQLVQSGAEVKKPGSSVKVSCKASGYTFTDYEIHWVRQAPGQGLEWIGVNDPESGGTFYNQKFDGRATLTADKSTSTAYMELSSLRSEDTAVYYCTRYDKWDGFNGMDYWGQGTTVTVSS

SEQ ID NO: 172 - protein, 121 aa, Artificial Sequence
  source: /note="Description of Artificial Sequence: Synthetic polypeptide"
EVQLVQSGAEVKKPGSSVKVSCKASGYTFTDYEIHWVRQAPGQGLEWIGVNDPESGGTFYNQKFDGRATLTADKSTSTAYMELSSLRSEDTAVYYCTRYDKWDSFYGMDYWGQGTTVTVSS

SEQ ID NO: 173 - protein, 121 aa, Artificial Sequence
  source: /note="Description of Artificial Sequence: Synthetic polypeptide"
EVQLVQSGAEVKKPGSSVKVSCKASGYTFTDYEIHWVRQAPGQGLEWIGVNDPESGGTFYNQKFDGRATLTADKSTSTAYMELSSLRSEDTAVYYCTRYDKYESFYGMDYWGQGTTVTVSS

SEQ ID NO: 174 - protein, 121 aa, Artificial Sequence
  source: /note="Description of Artificial Sequence: Synthetic polypeptide"
EVQLVQSGAEVKKPGSSVKVSCKASGYTFTDYEIHWVRQAPGQGLEWIGVNDPESGGTFYNQKFDGRATLTADKSTSTAYMELSSLRSEDTAVYYCTRYDRYWSFNGMDYWGQGTTVTVSS

SEQ ID NO: 175 - protein, 121 aa, Artificial Sequence
  source: /note="Description of Artificial Sequence: Synthetic polypeptide"
EVQLVQSGAEVKKPGSSVKVSCKASGYTFTDYEIHWVRQAPGQGLEWIGVNDPESGGTFYNQKFDGRATLTADKSTSTAYMELSSLRSEDTAVYYCTRYYKWDSFLGMDFWGQGTTVTVSS

SEQ ID NO: 176 - protein, 121 aa, Artificial Sequence
  source: /note="Description of Artificial Sequence: Synthetic polypeptide"
EVQLVQSGAEVKKPGSSVKVSCKASGYTFTDYEIHWVRQAPGQGLEWIGVNDPESGGTFYNQKFDGRATLTADKSTSTAYMELSSLRSEDTAVYYCTRYDMWESFNGMDYWGQGTTVTVSS

SEQ ID NO: 177 - protein, 121 aa, Artificial Sequence
  source: /note="Description of Artificial Sequence: Synthetic polypeptide"
EVQLVQSGAEVKKPGSSVKVSCKASGYTFTDYEIHWVRQAPGQGLEWIGVNDPESGGTFYNQKFDGRATLTADKSTSTAYMELSSLRSEDTAVYYCTRYYKWWGFMGMDYWGQGTTVTVSS

SEQ ID NO: 178 - protein, 121 aa, Artificial Sequence
  source: /note="Description of Artificial Sequence: Synthetic polypeptide"
EVQLVQSGAEVKKPGSSVKVSCKASGYTFTDYEIHWVRQAPGQGLEWIGVNDPESGGTFYNQKFDGRATLTADKSTSTAYMELSSLRSEDTAVYYCTRYYRYWGFEGMDYWGQGTTVTVSS

SEQ ID NO: 179 - protein, 121 aa, Artificial Sequence
  source: /note="Description of Artificial Sequence: Synthetic polypeptide"
EVQLVQSGAEVKKPGSSVKVSCKASGYTFTDYEIHWVRQAPGQGLEWIGVNDPESGGTFYNQKFDGRATLTADKSTSTAYMELSSLRSEDTAVYYCTRYDKYWSFQGMDYWGQGTTVTVSS

SEQ ID NO: 180 - protein, 121 aa, Artificial Sequence
  source: /note="Description of Artificial Sequence: Synthetic polypeptide"
EVQLVQSGAEVKKPGSSVKVSCKASGYTFTDYEIHWVRQAPGQGLEWIGVNDPESGGTFYNQKFDGRATLTADKSTSTAYMELSSLRSEDTAVYYCTRYDKYESFEGMDYWGQGTTVTVSS

SEQ ID NO: 181 - protein, 121 aa, Artificial Sequence
  source: /note="Description of Artificial Sequence: Synthetic polypeptide"
EVQLVQSGAEVKKPGSSVKVSCKASGYTFTDYEIHWVRQAPGQGLEWIGVNDPESGGTFYNQKFDGRATLTADKSTSTAYMELSSLRSEDTAVYYCTRYDKWMSFSGMDYWGQGTTVTVSS

SEQ ID NO: 182 - protein, 121 aa, Artificial Sequence
  source: /note="Description of Artificial Sequence: Synthetic polypeptide"
EVQLVQSGAEVKKPGSSVKVSCKASGYTFTDYEIHWVRQAPGQGLEWIGVNDPESGGTFYNQKFDGRATLTADKSTSTAYMELSSLRSEDTAVYYCTRYDKFYGFNGMDYWGQGTTVTVSS

SEQ ID NO: 183 - protein, 121 aa, Artificial Sequence
  source: /note="Description of Artificial Sequence: Synthetic polypeptide"
EVQLVQSGAEVKKPGSSVKVSCKASGYTFTDYEIHWVRQAPGQGLEWIGVNDPESGGTFYNQKFDGRATLTADKSTSTAYMELSSLRSEDTAVYYCTRYYKWDSFYGMDAWGQGTTVTVSS

SEQ ID NO: 184 - protein, 121 aa, Artificial Sequence
  source: /note="Description of Artificial Sequence: Synthetic polypeptide"
EVQLVQSGAEVKKPGSSVKVSCKASGYTFTDYEIHWVRQAPGQGLEWIGVNDPESGGTFYNQKFDGRATLTADKSTSTAYMELSSLRSEDTAVYYCTRYSKWDSFSGMDYWGQGTTVTVSS

SEQ ID NO: 185 - protein, 121 aa, Artificial Sequence
  source: /note="Description of Artificial Sequence: Synthetic polypeptide"
EVQLVQSGAEVKKPGSSVKVSCKASGYTFTDYEIHWVRQAPGQGLEWIGVNDPESGGTFYNQKFDGRATLTADKSTSTAYMELSSLRSEDTAVYYCTRYDKWESFYGMDYWGQGTTVTVSS

SEQ ID NO: 186 - protein, 121 aa, Artificial Sequence
  source: /note="Description of Artificial Sequence: Synthetic polypeptide"
EVQLVQSGAEVKKPGSSVKVSCKASGYTFTDYEIHWVRQAPGQGLEWIGVNDPESGGTFYNQKFDGRATLTADKSTSTAYMELSSLRSEDTAVYYCTRYDKWWSFSGMDYWGQGTTVTVSS

SEQ ID NO: 187 - protein, 121 aa, Artificial Sequence
  source: /note="Description of Artificial Sequence: Synthetic polypeptide"
EVQLVQSGAEVKKPGSSVKVSCKASGYTFTDYEIHWVRQAPGQGLEWIGVNDPESGGTFYNQKFDGRATLTADKSTSTAYMELSSLRSEDTAVYYCTRYDKWESFAGMDYWGQGTTVTVSS

SEQ ID NO: 188 - protein, 121 aa, Artificial Sequence
  source: /note="Description of Artificial Sequence: Synthetic polypeptide"
EVQLVQSGAEVKKPGSSVKVSCKASGYTFTDYEIHWVRQAPGQGLEWIGVNDPESGGTFYNQKFDGRATLTADKSTSTAYMELSSLRSEDTAVYYCTRYYRWESFQGMDYWGQGTTVTVSS

SEQ ID NO: 189 - protein, 121 aa, Artificial Sequence
  source: /note="Description of Artificial Sequence: Synthetic polypeptide"
EVQLVQSGAEVKKPGSSVKVSCKASGYTFTDYEIHWVRQAPGQGLEWIGVNDPESGGTFYNQKFDGRATLTADKSTSTAYMELSSLRSEDTAVYYCTRYDKYESLNGMDYWGQGTTVTVSS

SEQ ID NO: 190 - protein, 121 aa, Artificial Sequence
  source: /note="Description of Artificial Sequence: Synthetic polypeptide"
EVQLVQSGAEVKKPGSSVKVSCKASGYTFTDYEIHWVRQAPGQGLEWIGVNDPESGGTFYNQKFDGRATLTADKSTSTAYMELSSLRSEDTAVYYCTRYWKWDSFFGMDYWGQGTTVTVSS

SEQ ID NO: 191 - protein, 121 aa, Artificial Sequence
  source: /note="Description of Artificial Sequence: Synthetic polypeptide"
EVQLVQSGAEVKKPGSSVKVSCKASGYTFTDYEIHWVRQAPGQGLEWIGVNDPESGGTFYNQKFDGRATLTADKSTSTAYMELSSLRSEDTAVYYCTRYDKWESFSGMDYWGQGTTVTVSS

SEQ ID NO: 192 - protein, 121 aa, Artificial Sequence
  source: /note="Description of Artificial Sequence: Synthetic polypeptide"
EVQLVQSGAEVKKPGSSVKVSCKASGYTFTDYEIHWVRQAPGQGLEWIGVNDPESGGTFYNQKFDGRATLTADKSTSTAYMELSSLRSEDTAVYYCTRYDKYVGFEGMDYWGQGTTVTVSS

SEQ ID NO: 193 - protein, 121 aa, Artificial Sequence
  source: /note="Description of Artificial Sequence: Synthetic polypeptide"
EVQLVQSGAEVKKPGSSVKVSCKASGYTFTDYEIHWVRQAPGQGLEWIGVNDPESGGTFYNQKFDGRATLTADKSTSTAYMELSSLRSEDTAVYYCTRYDKFWSFNGMDYWGQGTTVTVSS

SEQ ID NO: 194 - protein, 121 aa, Artificial Sequence
  source: /note="Description of Artificial Sequence: Synthetic polypeptide"
EVQLVQSGAEVKKPGSSVKVSCKASGYTFTDYEIHWVRQAPGQGLEWIGVNDPESGGTFYNQKFDGRATLTADKSTSTAYMELSSLRSEDTAVYYCTRYSKWDSFQGMDYWGQGTTVTVSS

SEQ ID NO: 195 - protein, 121 aa, Artificial Sequence
  source: /note="Description of Artificial Sequence: Synthetic polypeptide"
EVQLVQSGAEVKKPGSSVKVSCKASGYTFTDYEIHWVRQAPGQGLEWIGVNDPESGGTFYNQKFDGRATLTADKSTSTAYMELSSLRSEDTAVYYCTRYFKWDSFEGMDYWGQGTTVTVSS

SEQ ID NO: 196 - protein, 121 aa, Artificial Sequence
  source: /note="Description of Artificial Sequence: Synthetic polypeptide"
EVQLVQSGAEVKKPGSSVKVSCKASGYTFTDYEIHWVRQAPGQGLEWIGVNDPESGGTFYNQKFDGRATLTADKSTSTAYMELSSLRSEDTAVYYCTRYSKWNSFDGMDYWGQGTTVTVSS

SEQ ID NO: 197 - protein, 121 aa, Artificial Sequence
  source: /note="Description of Artificial Sequence: Synthetic polypeptide"
EVQLVQSGAEVKKPGSSVKVSCKASGYTFTDYEIHWVRQAPGQGLEWIGVNDPESGGTFYNQKFDGRATLTADKSTSTAYMELSSLRSEDTAVYYCTRYSKWDSFDGMDYWGQGTTVTVSS

SEQ ID NO: 198 - protein, 121 aa, Artificial Sequence
  source: /note="Description of Artificial Sequence: Synthetic polypeptide"
EVQLVQSGAEVKKPGSSVKVSCKASGYTFTDYEIHWVRQAPGQGLEWIGVNDPESGGTFYNQKFDGRATLTADKSTSTAYMELSSLRSEDTAVYYCTRYDKWESFNGMDYWGQGTTVTVSS

SEQ ID NO: 199 - protein, 121 aa, Artificial Sequence
  source: /note="Description of Artificial Sequence: Synthetic polypeptide"
EVQLVQSGAEVKKPGSSVKVSCKASGYTFTDYEIHWVRQAPGQGLEWIGVNDPESGGTFYNQKFDGRATLTADKSTSTAYMELSSLRSEDTAVYYCTRYWKWDSFYGMDSWGQGTTVTVSS

SEQ ID NO: 200 - protein, 121 aa, Artificial Sequence
  source: /note="Description of Artificial Sequence: Synthetic polypeptide"
EVQLVQSGAEVKKPGSSVKVSCKASGYTFTDYEIHWVRQAPGQGLEWIGVNDPESGGTFYNQKFDGRATLTADKSTSTAYMELSSLRSEDTAVYYCTRYDKFDSFYGMDYWGQGTTVTVSS

SEQ ID NO: 201 - protein, 121 aa, Artificial Sequence
  source: /note="Description of Artificial Sequence: Synthetic polypeptide"
EVQLVQSGAEVKKPGSSVKVSCKASGYTFTDYEIHWVRQAPGQGLEWIGVNDPESGGTFYNQKFDGRATLTADKSTSTAYMELSSLRSEDTAVYYCTRYDKWEGFRGMDLWGQGTTVTVSS

SEQ ID NO: 202 - protein, 121 aa, Artificial Sequence
  source: /note="Description of Artificial Sequence: Synthetic polypeptide"
EVQLVQSGAEVKKPGSSVKVSCKASGYTFTDYEIHWVRQAPGQGLEWIGVNDPESGGTFYNQKFDGRATLTADKSTSTAYMELSSLRSEDTAVYYCTRYEKWDSFNGMDYWGQGTTVTVSS

SEQ ID NO: 203 - protein, 121 aa, Artificial Sequence
  source: /note="Description of Artificial Sequence: Synthetic polypeptide"
EVQLVQSGAEVKKPGSSVKVSCKASGYTFTDYEIHWVRQAPGQGLEWIGVNDPESGGTFYNQKFDGRATLTADKSTSTAYMELSSLRSEDTAVYYCTRYYKWESFQGMDYWGQGTTVTVSS

SEQ ID NO: 204 - protein, 121 aa, Artificial Sequence
  source: /note="Description of Artificial Sequence: Synthetic polypeptide"
EVQLVQSGAEVKKPGSSVKVSCKASGYTFTDYEIHWVRQAPGQGLEWIGVNDPESGGTFYNQKFDGRATLTADKSTSTAYMELSSLRSEDTAVYYCTRYDKFYSFNGMDYWGQGTTVTVSS

SEQ ID NO: 205 - protein, 121 aa, Artificial Sequence
  source: /note="Description of Artificial Sequence: Synthetic polypeptide"
EVQLVQSGAEVKKPGSSVKVSCKASGYTFTDYEIHWVRQAPGQGLEWIGVNDPESGGTFYNQKFDGRATLTADKSTSTAYMELSSLRSEDTAVYYCTRYNKWDSFLGMDYWGQGTTVTVSS

SEQ ID NO: 206 - protein, 121 aa, Artificial Sequence
  source: /note="Description of Artificial Sequence: Synthetic polypeptide"
EVQLVQSGAEVKKPGSSVKVSCKASGYTFTDYEIHWVRQAPGQGLEWIGVNDPESGGTFYNQKFDGRATLTADKSTSTAYMELSSLRSEDTAVYYCTRYDKYESFNGMDYWGQGTTVTVSS

SEQ ID NO: 207 - protein, 121 aa, Artificial Sequence
  source: /note="Description of Artificial Sequence: Synthetic polypeptide"
EVQLVQSGAEVKKPGSSVKVSCKASGYTFTDYEIHWVRQAPGQGLEWIGVNDPESGGTFYNQKFDGRATLTADKSTSTAYMELSSLRSEDTAVYYCTRYYRYESFYGMDYWGKGTTVTVSS

SEQ ID NO: 208 - protein, 121 aa, Artificial Sequence; identical to SEQ ID NO: 108
  source: /note="Description of Artificial Sequence: Synthetic polypeptide"

SEQ ID NO: 209 - protein, 121 aa, Artificial Sequence; identical to SEQ ID NO: 108
  source: /note="Description of Artificial Sequence: Synthetic polypeptide"

SEQ ID NO: 210 - protein, 121 aa, Artificial Sequence
  source: /note="Description of Artificial Sequence: Synthetic polypeptide"
EVQLVQSGAEVKKPGSSVKVSCKASGYTFTDYEIHWVRQAPGQGLEWMGVNDPESGGTLYNQKFDGRVTLTADESTSTAYMELSSLRSEDTAVYYCTRYDRYWSFNGMDYWGQGTTVTVSS

SEQ ID NO: 211 - protein, 121 aa, Artificial Sequence
  source: /note="Description of Artificial Sequence: Synthetic polypeptide"
EVQLVQSGAEVKKPGSSVKVSCKASGYTFTDYEIHWVRQAPGQGLEWIGVNDPDSGGTLYNQKFDGRVTLTADESTSTAYMELSSLRSEDTAVYYCTRYWKWDSFFGMDYWGQGTTVTVSS

SEQ ID NO: 212 - protein, 121 aa, Artificial Sequence
  source: /note="Description of Artificial Sequence: Synthetic polypeptide"
EVQLVQSGAEVKKPGSSVKVSCKASGYTFTDYEIHWVRQAPGQGLEWIGVNDPESGGTFYNQKFDGRVTLTADKSTSTAYMELSSLRSEDTAVYYCTRYDKWYSFEGMDIWGQGTTVTVSS

SEQ ID NO: 213 - protein, 121 aa, Artificial Sequence
  source: /note="Description of Artificial Sequence: Synthetic polypeptide"
EVQLVQSGAEVKKPGSSVKVSCKASGYTFPDYEIHWVRQAPGQGLEWIGVNDPESGGTFYNQKFDGRATLTADESTSTAYMELSSLRSEDTAVYYCTRYDKWESFNGMDYWGQGTTVTVSS

SEQ ID NO: 214 - protein, 121 aa, Artificial Sequence
  source: /note="Description of Artificial Sequence: Synthetic polypeptide"
EVQLVQSGAEVKKPGSSVKVSCKASGYTFTDYEIHWVRQAPGQGLEWIGVNDPESGGTYYNQKFDGRATLTADESTSTAYMELSSLRSEDTAVYYCTRYSKWDSFQGMDYWGQGTTVTVSS

SEQ ID NO: 215 - protein, 121 aa, Artificial Sequence
  source: /note="Description of Artificial Sequence: Synthetic polypeptide"
EVQLVQSGAEVKKPGSSVKVSCKASGYTFDDYEIHWVRQAPGQGLEWIGVNDPESGGTFYNQKFDGRATLTADESTSTAYMELSSLRSEDTAVYYCTRYSKWDSFLGMDYWGQGTTVTVSS

SEQ ID NO: 216 - protein, 121 aa, Artificial Sequence
  source: /note="Description of Artificial Sequence: Synthetic polypeptide"
EVQLVQSGAEVKKPGSSVKVSCKASGYTFTDYEIHWVRQAPGQGLEWMGVNDPESGGTFYNQKFDGRVTLTADESTSTAYMELSSLRSEDTAVYYCTRYDKYWSFQGMDYWGQGTTVTVSS

SEQ ID NO: 217 - protein, 121 aa, Artificial Sequence
  source: /note="Description of Artificial Sequence: Synthetic polypeptide"
EVQLVQSGAEVKKPGSSVKVSCKASGYTFDDYEIHWVRQAPGQGLEWIGVNDPESGGTFYNQKFDGRATLTADKSTSTAYMELSSLRSEDTAVYYCTRYDKYWSFEGMDYWGQGTTVTVSS

SEQ ID NO: 218 - protein, 121 aa, Artificial Sequence
  source: /note="Description of Artificial Sequence: Synthetic polypeptide"
EVQLVQSGAEVKKPGSSVKVSCKASGYTFSDYEIHWVRQAPGQGLEWIGVNDPESGGTFYNQKFDGRATLTADESTSTAYMELSSLRSEDTAVYYCTRYDKWYSFEGMDIWGQGTTVTVSS

SEQ ID NO: 219 - protein, 121 aa, Artificial Sequence
  source: /note="Description of Artificial Sequence: Synthetic polypeptide"
EVQLVQSGAEVKKPGSSVKVSCKASGYTFDDYEIHWVRQAPGQGLEWMGVNDPESGGTFYNQKFDGRVTLTADKSTSTAYMELSSLRSEDTAVYYCTRYDKWESFNGMDEWGQGTTVTVSS

SEQ ID NO: 220 - protein, 121 aa, Artificial Sequence
  source: /note="Description of Artificial Sequence: Synthetic polypeptide"
EVQLVQSGAEVKKPGSSVKVSCKASGYTFTDYEIHWVRQAPGQGLEWIGVNDPESGGTFYNQKFDGRVTLTADESTSTAYMELSSLRSEDTAVYYCTRYDKWDSFYGMDYWGQGTTVTVSS

SEQ ID NO: 221 - protein, 121 aa, Artificial Sequence
  source: /note="Description of Artificial Sequence: Synthetic polypeptide"
EVQLVQSGAEVKKPGSSVKVSCKASGYTFNDYEIHWVRQAPGQGLEWIGVNDPESGGTYYNQKFDGRATLTADESTSTAYMELSSLRSEDTAVYYCTRYDKWYSFEGMDIWGQGTTVTVSS

SEQ ID NO: 222 - protein, 121 aa, Artificial Sequence; identical to SEQ ID NO: 112
  source: /note="Description of Artificial Sequence: Synthetic polypeptide"

SEQ ID NO: 223 - protein, 121 aa, Artificial Sequence
  source: /note="Description of Artificial Sequence: Synthetic polypeptide"
EVQLVQSGAEVKKPGSSVKVSCKASGYTFDDYEIHWVRQAPGQGLEWMGVNDPESGGTFYNQKFDGRVTLTADKSTSTAYMELSSLRSEDTAVYYCTRYDKWESFNGMDYWGQGTTVTVSS

SEQ ID NO: 224 - protein, 121 aa, Artificial Sequence; identical to SEQ ID NO: 111
  source: /note="Description of Artificial Sequence: Synthetic polypeptide"

SEQ ID NO: 225 - protein, 121 aa, Artificial Sequence
  source: /note="Description of Artificial Sequence: Synthetic polypeptide"
EVQLVQSGAEVKKPGSSVKVSCKASGYTFDDYEIHWVRQAPGQGLEWIGVNDPESGGTFYNQKFDGRATLTADESTSTAYMELSSLRSEDTAVYYCTRYDKYWSFEGMDYWGQGTTVTVSS

SEQ ID NO: 226 - protein, 121 aa, Artificial Sequence
  source: /note="Description of Artificial Sequence: Synthetic polypeptide"
EVQLVQSGAEVKKPGSSVKVSCKASGYTFADYEIHWVRQAPGQGLEWIGVNDPESGGTFYNQKFDGRVTLTADESTSTAYMELSSLRSEDTAVYYCTRYDKYWSFEGMDYWGQGTTVTVSS

SEQ ID NO: 227 - protein, 121 aa, Artificial Sequence
  source: /note="Description of Artificial Sequence: Synthetic polypeptide"
EVQLVQSGAEVKKPGSSVKVSCKASGYTFDDYEIHWVRQAPGQGLEWMGVNDPESGGTFYNQKFDGRVTLTADESTSTAYMELSSLRSEDTAVYYCTRYEKWDSFNGMDYWGQGTTVTVSS

SEQ ID NO: 228 - protein, 121 aa, Artificial Sequence
  source: /note="Description of Artificial Sequence: Synthetic polypeptide"
EVQLVQSGAEVKKPGSSVKVSCKASGYTFTDYEIHWVRQAPGQGLEWMGVNDPESGGTFYNQKFDGRITLTADESTSTAYMELSSLRSEDTAVYYCTRYDKWYSFEGMDIWGQGTTVTVSS

SEQ ID NO: 229 - protein, 121 aa, Artificial Sequence
  source: /note="Description of Artificial Sequence: Synthetic polypeptide"
EVQLVQSGAEVKKPGSSVKVSCKASGYTFDDYEIHWVRQAPGQGLEWMGVNDPESGGTFYNQKFDGRVTLTADESTSTAYMELSSLRSEDTAVYYCTRYDKYWSLNGMDEWGQGTTVTVSS

SEQ ID NO: 230 - protein, 121 aa, Artificial Sequence
  source: /note="Description of Artificial Sequence: Synthetic polypeptide"
EVQLVQSGAEVKKPGSSVKVSCKASGYTFTDYEIHWVRQAPGQGLEWIGVNDPDSGGTLYNQKFDGRVTLTADESTSTAYMELSSLRSEDTAVYYCTRYDRYWSFNGMDYWGQGTTVTVSS

SEQ ID NO: 231 - protein, 121 aa, Artificial Sequence; identical to SEQ ID NO: 114
  source: /note="Description of Artificial Sequence: Synthetic polypeptide"

SEQ ID NO: 232 - protein, 121 aa, Artificial Sequence
  source: /note="Description of Artificial Sequence: Synthetic polypeptide"
EVQLVQSGAEVKKPGSSVKVSCKASGYTFTDYEIHWVRQAPGQGLEWIGVNDPESGGTFYNQKFDGRVTLTADESTSTAYMELSSLRSEDTAVYYCTRYDKYWSFNGMDYWGQGTTVTVSS

SEQ ID NO: 233 - protein, 121 aa, Artificial Sequence
  source: /note="Description of Artificial Sequence: Synthetic polypeptide"
EVQLVQSGAEVKKPGSSVKVSCKASGYTFPDYEIHWVRQAPGQGLEWIGVNDPESGGTFYNQKFDGRVTLTADESTSTAYMELSSLRSEDTAVYYCTRYDKWYSFEGMDIWGQGTTVTVSS

SEQ ID NO: 234 - protein, 121 aa, Artificial Sequence
  source: /note="Description of Artificial Sequence: Synthetic polypeptide"
EVQLVQSGAEVKKPGSSVKVSCKASGYTFTDYEIHWVRQAPGQGLEWIGVNDPESGGTFYNQKFDGRVTLTADESTSTAYMELSSLRSEDTAVYYCTRYDKWYSFEGMDIWGQGTTVTVSS

SEQ ID NO: 235 - protein, 121 aa, Artificial Sequence
  source: /note="Description of Artificial Sequence: Synthetic polypeptide"
EVQLVQSGAEVKKPGSSVKVSCKASGYTFEDYEIHWVRQAPGQGLEWIGVNDPDSGGTLYNQKFDGRVTLTADKSTSTAYMELSSLRSEDTAVYYCTRYSKWDSFLGMDYWGQGTTVTVSS

SEQ ID NO: 236 - protein, 121 aa, Artificial Sequence
  source: /note="Description of Artificial Sequence: Synthetic polypeptide"
EVQLVQSGAEVKKPGSSVKVSCKASGYTFTDYEIHWVRQAPGQGLEWMGVNDPESGGTFYNQKFDGRVTLTADESTSTAYMELSSLRSEDTAVYYCTRYDKWESFNGMDYWGQGTTVTVSS

SEQ ID NO: 237 - protein, 121 aa, Artificial Sequence
  source: /note="Description of Artificial Sequence: Synthetic polypeptide"
EVQLVQSGAEVKKPGSSVKVSCKASGYTFTDYEIHWVRQAPGQGLEWIGVNDPESGGTFYNQKFDGRATLTADESTSTAYMELSSLRSEDTAVYYCTRYDKWYSFEGMDIWGQGTTVTVSS

SEQ ID NO: 238 - protein, 121 aa, Artificial Sequence
  source: /note="Description of Artificial Sequence: Synthetic polypeptide"
EVQLVQSGAEVKKPGSSVKVSCKASGYTFADYEIHWVRQAPGQGLEWIGVNDPESGGTFYNQKFDGRATLTADESTSTAYMELSSLRSEDTAVYYCTRYDKWYSFEGMDIWGQGTTVTVSS

SEQ ID NO: 239 - protein, 121 aa, Artificial Sequence
  source: /note="Description of Artificial Sequence: Synthetic polypeptide"
EVQLVQSGAEVKKPGSSVKVSCKASGYTFDDYEIHWVRQAPGQGLEWIGVNDPESGGTLYNQKFDGRVTLTTDKSTSTAYMELSSLRSEDTAVYYCTRYDKWYSFEGMDIWGQGTTVTVSS

SEQ ID NO: 240 - protein, 121 aa, Artificial Sequence
  source: /note="Description of Artificial Sequence: Synthetic polypeptide"
EVQLVQSGAEVKKPGSSVKVSCKASGYTFTDYEIHWVRQAPGQGLEWIGVNDPESGGTFYNQKFDGRATLTADESTSTAYMELSSLRSEDTAVYYCTRYDKWESFNGMDYWGQGTTVTVSS

SEQ ID NO: 241 - protein, 121 aa, Artificial Sequence; identical to SEQ ID NO: 113
  source: /note="Description of Artificial Sequence: Synthetic polypeptide"

SEQ ID NO: 242 - protein, 121 aa, Artificial Sequence; identical to SEQ ID NO: 115
  source: /note="Description of Artificial Sequence: Synthetic polypeptide"

SEQ ID NO: 243 - protein, 121 aa, Artificial Sequence
  source: /note="Description of Artificial Sequence: Synthetic polypeptide"
EVQLVQSGAEVKKPGSSVKVSCKASGYTFDDYEIHWVRQAPGQGLEWMGVNDPESGGTFYNQKFDGRVTLTADESTSTAYMELSSLRSEDTAVYYCTRYDKWDSFYGMDYWGQGTTVTVSS

SEQ ID NO: 244 - protein, 121 aa, Artificial Sequence
  source: /note="Description of Artificial Sequence: Synthetic polypeptide"
EVQLVQSGAEVKKPGSSVKVSCKASGYTFDDYEIHWVRQAPGQGLEWMGVNDPESGGTFYNQKFDGRVTLTADESTSTAYMELSSLRSEDTAVYYCTRYDKWYSFEGMDIWGQGTTVTVSS

SEQ ID NO: 245 - protein, 121 aa, Artificial Sequence
  source: /note="Description of Artificial Sequence: Synthetic polypeptide"
EVQLVQSGAEVRKPGSSVKVSCKASGYTFEDYEIHWVRQAPGQGLEWMGVIDPESGGTLYNQKFDGRVTLTADESTSTAYMELSSLRSEDTAVYYCTRYDKWYSFEGMDIWGQGTTVTVSS

SEQ ID NO: 246 - protein, 121 aa, Artificial Sequence
  source: /note="Description of Artificial Sequence: Synthetic polypeptide"
EVQLVQSGAEVKKPGSSVKVSCKASGYTFDDYEIHWVRQAPGQGLEWMGVNDPESGGTFYNQKFDGRVTLTADESTSTAYMELSSLRSEDTAVYYCTRYDKWWSFSGMDYWGQGTTVTVSS

SEQ ID NO: 247 - protein, 121 aa, Artificial Sequence; identical to SEQ ID NO: 30
  source: /note="Description of Artificial Sequence: Synthetic polypeptide"

SEQ ID NO: 248 - protein, 121 aa, Artificial Sequence
  source: /note="Description of Artificial Sequence: Synthetic polypeptide"
EVQLVQSGAEVKKPGSSVKVSCKASGYTFADYEIHWVRQAPGQGLEWIGVNDPESGGTFYNQKFDGRATLTADKSTSTAYMELSSLRSEDTAVYYCTRYDKWESFNGMDYWGQGTTVTVSS

SEQ ID NO: 249 - protein, 121 aa, Artificial Sequence
  source: /note="Description of Artificial Sequence: Synthetic polypeptide"
EVQLVQSGAEVKKPGSSVKVSCKASGYTFADYEIHWVRQAPGQGLEWIGVNDPESGGTFYNQKFDGRATLTADKSTSTAYMELSSLRSEDTAVYYCTRYSKWDSFDGMDYWGQGTTVTVSS

SEQ ID NO: 250 - protein, 121 aa, Artificial Sequence
  source: /note="Description of Artificial Sequence: Synthetic polypeptide"
EVQLVQSGAEVKKPGSSVKVSCKASGYTFTDYEIHWVRQAPGQGLEWIGVNDPESGGTFYNQKFDGRATLTADKSTSTAYMELSSLRSEDTAVYYCTRYDKWYSFEGMDIWGQGTTVTVSS

SEQ ID NO: 251 - protein, 121 aa, Artificial Sequence
  source: /note="Description of Artificial Sequence: Synthetic polypeptide"
EVQLVQSGAEVKKPGSSVKVSCKASGYTFTDYEIHWVRQAPGQGLEWIGVNDPESGGTFYNQKFDGRATLTADESTSTAYMELSSLRSEDTAVYYCTRYDKWDSFYGMDCWGQGTTVTVSS

SEQ ID NO: 252 - protein, 121 aa, Artificial Sequence
  source: /note="Description of Artificial Sequence: Synthetic polypeptide"
EVQLVQSGAEVKKPGSSVKVSCKASGYTFSDYEIHWVRQAPGQGLEWMGVNDPESGGTFYNQKFDGRVTLTADESTSTAYMELSSLRSEDTAVYYCTRYWKWDSFYGMDSWGQGTTVTVSS

SEQ ID NO: 253 - protein, 121 aa, Artificial Sequence
  source: /note="Description of Artificial Sequence: Synthetic polypeptide"
EVQLVQSGAEVKKPGSSVKVSCKASGYTFDDYEIHWVRQAPGQGLEWMGVNDPESGGTFYNQKFDGRVTLTADKSTSTAYMELSSLRSEDTAVYYCTRYDKWYSFEGMDIWGQGTTVTVSS

SEQ ID NO: 254 - protein, 121 aa, Artificial Sequence
  source: /note="Description of Artificial Sequence: Synthetic polypeptide"
EVQLVQSGAEVKKPGSSVKVSCKASGYTFTDYEIHWVRQAPGQGLEWIGVNDPDSGGTLYNQKFDGRVTLTADESTSTAYMELSSLRSEDTAVYYCTRYDKWESFNGMDYWGQGTTVTVSS

SEQ ID NO: 255 - protein, 121 aa, Artificial Sequence
  source: /note="Description of Artificial Sequence: Synthetic polypeptide"
EVQLVQSGAEVKKPGSSVKVSCKASGYTFTDYEIHWVRQAPGQGLEWIGVNDPESGGTFYNQKFDGRATLTADESTSTAYMELSSLRSEDTAVYYCTRYDKWDGFNGMDYWGQGTTVTVSS

SEQ ID NO: 256 - protein, 121 aa, Artificial Sequence
  source: /note="Description of Artificial Sequence: Synthetic polypeptide"
EVQLVQSGAEVKKPGSSVKVSCKASGYTFTDYEIHWVRQAPGQGLEWIGVNDPESGGTFYNQKFDGRATLTADKSTSTAYMELSSLRSEDTAVYYCTRYSKWDSFLGMDYWGQGTTVTVSS

SEQ ID NO: 257 - protein, 121 aa, Artificial Sequence
  source: /note="Description of Artificial Sequence: Synthetic polypeptide"
EVQLVQSGAEVKKPGSSVKVSCKASGYTFSDYEIHWVRQAPGQGLEWIGVNDPDSGGTLYNQKFDGRVTLTADESTSTAYMELSSLRSEDTAVYYCTRYDKWEGFRGMDLWGQGTTVTVSS

SEQ ID NO: 258 - protein, 121 aa, Artificial Sequence
  source: /note="Description of Artificial Sequence: Synthetic polypeptide"
EVQLVQSGAEVKKPGSSVKVSCKASGYTFTDYEIHWVRQAPGQRLEWIGVNDPESGGTFYNQKFDGRVTLTADESTSTAYMELSSLRSEDTAVYYCTRYDKWESFNGMDYWGQGTTVTVSS

SEQ ID NO: 259 - protein, 121 aa, Artificial Sequence
  source: /note="Description of Artificial Sequence: Synthetic polypeptide"
EVQLVQSGAEVKKPGSSVKVSCKASGYTFDDYEIHWVRQAPGQGLEWIGVIDPESGGTLYNQKFDGRVTITADESTSTAYMELSSLRSEDTAVYYCTRYDRYWSFEGMDYWGQGTTVTVSS

SEQ ID NO: 260 - protein, 121 aa, Artificial Sequence
  source: /note="Description of Artificial Sequence: Synthetic polypeptide"
EVQLVQSGAEVKKPGSSVKVSCKASGYTFDDYEIHWVRQAPGQGLEWIGVNDPESGGTLYNQKFDGRVTLTADKSTSTAYMELSSLRSEDTAVYYCTRYDKWYSFEGMDIWGQGTTVTVSS

SEQ ID NO: 261 - protein, 121 aa, Artificial Sequence; identical to SEQ ID NO: 260
  source: /note="Description of Artificial Sequence: Synthetic polypeptide"

SEQ ID NO: 262 - protein, 121 aa, Artificial Sequence
  source: /note="Description of Artificial Sequence: Synthetic polypeptide"
EVQLVQSGAEVKKPGSSVKVSCKASGYTFDEYEIHWVRQAPGQGLEWMGVNDPESGGTLYNQKFDGRVTLTADKSTSTAYMELSSLRSEDTAVYYCTRYDKWDSFYGMDYWGQGTTVTVSS

SEQ ID NO: 263 - protein, 121 aa, Artificial Sequence
  source: /note="Description of Artificial Sequence: Synthetic polypeptide"
EVQLVQSGAEVKKPGSSVKVSCKASGYTFTDYEIHWVRQAPGQGLEWIGVNDPESGGTLYNQKFDGRATITADESTSTAYMELSSLRSEDTAVYYCTRYYKWDSFEGMDYWGQGTTVTVSS

SEQ ID NO: 264 - protein, 121 aa, Artificial Sequence
  source: /note="Description of Artificial Sequence: Synthetic polypeptide"
EVQLVQSGAEVKKPGSSVKVSCKASGYTFDDYEIHWVRQAPGQGLEWMGVIDPESGGTLYNQKFDGRVTLTADKSTSTAYMELSSLRSEDTAVYYCTRYDKWYSFEGMDIWGQGTTVTVSS

SEQ ID NO: 265 - protein, 121 aa, Artificial Sequence
  source: /note="Description of Artificial Sequence: Synthetic polypeptide"
EVQLVQSGAEVKKPGSSVKVSCKASGYTFDDYEIHWVRQAPGQGLEWIGVNDPESGGTFYNQKFDGRVTLTADKSTSTAYMELSSLRSEDTAVYYCTRYDKYWSFEGMDYWGQGTTVTVSS

SEQ ID NO: 266 - protein, 121 aa, Artificial Sequence
  source: /note="Description of Artificial Sequence: Synthetic polypeptide"
EVQLVQSGAEVKKPGSSVKVSCKASGYTFDDYEIHWVRQAPGQGLEWIGVNDPESGGTMYNQKFDGRVTITADKSTSTAYMELSSLRSEDTAVYYCTRYDKWDSFYGMDCWGQGTTVTVSS

SEQ ID NO: 267 - protein, 121 aa, Artificial Sequence
  source: /note="Description of Artificial Sequence: Synthetic polypeptide"
EVQLVQSGAEVKKPGSSVKVSCKASGYTFDDYEIHWVRQAPGQGLEWIGVNDPDSGGTLYNQKFDGRVTITADKSTSTAYMELSSLRSEDTAVYYCTRYDKWESFNGMDYWGQGTTVTVSS

SEQ ID NO: 268 - protein, 121 aa, Artificial Sequence
  source: /note="Description of Artificial Sequence: Synthetic polypeptide"
EVQLVQSGAEVKKPGSSVKVSCKASGYTFDDYEIHWVRQAPGQGLEWMGVIDPDSGGTLYNQKFDGRVTLTADKSTSTAYMELSSLRSEDTAVYYCTRYDKWDSFYGMDYWGQGTTVTVSS

SEQ ID NO: 269 - protein, 121 aa, Artificial Sequence
  source: /note="Description of Artificial Sequence: Synthetic polypeptide"
EVQLVQSGAEVKKPGSSVKVSCKASGYTFDDYEIHWVRQAPGQGLEWMGVIDPESGGILYNQKFDGRVTLTADKSTSTAYMELSSLRSEDTAVYYCTRYDKWESFAGMDYWGQGTTVTVSS

SEQ ID NO: 270 - protein, 121 aa, Artificial Sequence
  source: /note="Description of Artificial Sequence: Synthetic polypeptide"
EVQLVQSGAEVKKPGSSVKVSCKASGYTFTDYEIHWVRQAPGQGLEWMGVNDPESGGTFYNQKFDGRVTLTADKSTSTAYMELSSLRSEDTAVYYCTRYDRWDSFNGMDEWGQGTTVTVSS

SEQ ID NO: 271 - protein, 121 aa, Artificial Sequence
  source: /note="Description of Artificial Sequence: Synthetic polypeptide"
EVQLVQSGAEVKKPGSSVKVSCKASGYTFTDYEIHWVRQAPGQGLEWIGVNDPESGGTFYNQKFDGRVTLTADESTSTAYMELSSLRSEDTAVYYCTRYDKWESFNGMDYWGQGTTVTVSS

SEQ ID NO: 272 - protein, 121 aa, Artificial Sequence
  source: /note="Description of Artificial Sequence: Synthetic polypeptide"
EVQLVQSGAEVKKPGSSVKVSCKASGYTFTDYEIHWVRQAPGQGLEWMGVNDPESGGTFYNQKFDGRVTLTADESTSTAYMELSSLRSEDTAVYYCTRYWKWDSFYGMDSWGQGTTVTVSS

SEQ ID NO: 273 - protein, 121 aa, Artificial Sequence
  source: /note="Description of Artificial Sequence: Synthetic polypeptide"
EVQLVQSGAEVKKPGSSVKVSCKASGYTFSDYEIHWVRQAPGQGLEWMGVNDPESGGTFYNQKFDGRVTLTADESTSTAYMELSSLRSEDTAVYYCTRYDKWDSFYGMDYWGQGTTVTVSS

SEQ ID NO: 274 - protein, 121 aa, Artificial Sequence
  source: /note="Description of Artificial Sequence: Synthetic polypeptide"
EVQLVQSGAEVKKPGSSVKVSCKASGYTFDDYEIHWVRQAPGQGLEWIGVNDPESGGTLYNQKFDGRVTITADESTSTAYMELSSLRSEDTAVYYCTRYDKWESFSGMDYWGQGTTVTVSS

SEQ ID NO: 275 - protein, 121 aa, Artificial Sequence
  source: /note="Description of Artificial Sequence: Synthetic polypeptide"
EVQLVQSGAEVKKPGSSVKVSCKASGYTFDDYEIHWVRQAPGQGLEWIGVNDPESGGTFYNQKFDGRATLTADKSTSTAYMELSSLRSEDTAVYYCTRYDKWYSFEGMDIWGQGTTVTVSS

SEQ ID NO: 276 - protein, 121 aa, Artificial Sequence
  source: /note="Description of Artificial Sequence: Synthetic polypeptide"
EVQLVQSGAEVKKPGSSVKVSCKASGYTFDDYEIHWVRQAPGQGLEWMGVNDPESGGTMYNQKFDGRVTLTADKSTSTAYMELSSLRSEDTAVYYCTRYDKWDSFYGMDCWGQGTTVTVSS

SEQ ID NO: 277 - protein, 121 aa, Artificial Sequence
  source: /note="Description of Artificial Sequence: Synthetic polypeptide"
EVQLVQSWAEVKKPGSSVKVSCKASGYTFTEYEIHWVRQAPGQGLEWIGVNDPESGGTFYNQKFDGRVTLTADESTSTAYMELSSLRSEDTAVYYCTRYDKWESFNGMDYWGQGTTVTVSS

SEQ ID NO: 278 - protein, 121 aa, Artificial Sequence
  source: /note="Description of Artificial Sequence: Synthetic polypeptide"
EVQLVQSGAEVKKPGSSVKVSCKASGYTFSDYEIHWVRQAPGQGLEWMGVNDPESGGTFYNQKFDGRVTLTADESTSTAYMELSSLRSEDTAVYYCTRYDKWDSFYGMDCWGQGTTVTVSS

SEQ ID NO: 279 - protein, 121 aa, Artificial Sequence
  source: /note="Description of Artificial Sequence: Synthetic polypeptide"
EVQLVQSGAEVKKPGSSVKVSCKASGYTFDDYEIHWVRQAPGQGLEWMGVIDPESGGTLYNQKFDGRATLTADKSTSTAYMELSSLRSEDTAVYYCTRYDKWDSFYGMDYWGQGTTVTVSS

SEQ ID NO: 280 - protein, 121 aa, Artificial Sequence
  source: /note="Description of Artificial Sequence: Synthetic polypeptide"
EVQLVQSGAEVKKPGSSVKVSCKASGYTFSDYEIHWVRQAPGQGLEWMGVNDPESGGTFYNQKFDGRVTLTADESTSTAYMELSSLRSEDTAVYYCTRYFKWDSFEGMDYWGQGTTVTVSS

SEQ ID NO: 281 - protein, 121 aa, Artificial Sequence
  source: /note="Description of Artificial Sequence: Synthetic polypeptide"
EVQLVQSGAEVKKPGSSVKVSCKASGYTFDDYEIHWVRQAPGQGLEWIGVNDPESGGTFYNQKFDGRATLTADKSTSTAYMELSSLRSEDTAVYYCTRYWKFDSFYGMDLWGQGTTVTVSS

SEQ ID NO: 282 - protein, 121 aa, Artificial Sequence
  source: /note="Description of Artificial Sequence: Synthetic polypeptide"
EVQLVQSGAEVKKPGSPVKVSCKASGYTFTDYEIHWVRQAPGQGLEWIGVNDPDSGGTLYNQKFDGRVTLTADESTSTAYMELSSLRSEDTAVYYCTRYDKFWSFNGMDYWGQGTTVTVSS

SEQ ID NO: 283 - protein, 121 aa, Artificial Sequence
  source: /note="Description of Artificial Sequence: Synthetic polypeptide"
EVQLVQSGAEVKKPGSSVKVSCKASGYTFDDYEIHWVRQAPGQGLEWMGVNDPESGGTFYNQKFDGRVTLTADESTSTAYMELSSLRSEDTAVYYCTRYDKWESFNGMDYWGQGTTVTVSS

SEQ ID NO: 284 - protein, 121 aa, Artificial Sequence
  source: /note="Description of Artificial Sequence: Synthetic polypeptide"
EVQLVQSGAEVKKPGSSVKVSCKASGYTFTDYEIHWVRQAPGQGLEWIGVNDPESGGTFYNQKFDGRVTLTADKSTSTAYMELSSLRSEDTAVYYCTRYDKWDSFYGMDYWGQGTTVTVSS

SEQ ID NO: 285 - protein, 121 aa, Artificial Sequence
  source: /note="Description of Artificial Sequence: Synthetic polypeptide"
EVQLVQSGAEVKKPGSSVKVSCKASGYTFSDYEIHWVRQAPGQGLEWMGVNDPESGGTFYNQKFDGRVTLTADESTSTAYMELSSLRSEDTAVYYCTRYDKWESFNGMDYWGQGTTVTVSS

SEQ ID NO: 286 - protein, 121 aa, Artificial Sequence
  source: /note="Description of Artificial Sequence: Synthetic polypeptide"
EVQLVQSGAEVKKPGSSVKVSCKASGYTFDDYEIHWVRQAPGQGLEWIGVNDPESGGTLYNQKFDGRVTITADKSTSTAYMELSSLRSEDTAVYYCTRYEKWDSFNGMDYWGQGTTVTVSS

SEQ ID NO: 287 - protein, 121 aa, Artificial Sequence
  source: /note="Description of Artificial Sequence: Synthetic polypeptide"
EVQLVQSGAEVKKPGSSVKVSCKASGYTFTDYEIHWVRQAPGQGLEWMGVNDPESGGTFYNQKFDGRVTLTADESTSTAYMELSSLRSEDTAVYYCTRYDKYWSFEGMDYWGQGTTVTVSS

SEQ ID NO: 288 - protein, 121 aa, Artificial Sequence
  source: /note="Description of Artificial Sequence: Synthetic polypeptide"
EVQLVQSGAEVKKPGSSVKVSCKASGYTFTDYEIHWVRQAPGQGLEWMGVNDPESGGTFYNQKFDGRVTLTADESTSTAYMELSSLRSEDTAVYYCTRYSKWDSFQGMDYWGQGTTVTVSS

SEQ ID NO: 289 - protein, 121 aa, Artificial Sequence
  source: /note="Description of Artificial Sequence: Synthetic polypeptide"
EVQLVQSGAEVKKPGSSVKVSCKASGYTFTDYEIHWVRQAPGQGLEWIGVNDPESGGTFYNQKFDGRATLTADESTSTAYMELSSLRSEDTAVYYCTRYDKWESFAGMDYWGQGTTVTVSS

SEQ ID NO: 290 - protein, 121 aa, Artificial Sequence
  source: /note="Description of Artificial Sequence: Synthetic polypeptide"
EVQLVQSGAEVKKPGSSVKVSCKASGYTFTDYEIHWVRQAPGQGLEWIGVNDPESGGTFYNQKFDGRVTLTADKSTSTAYMELSSLRSEDTAVYYCTRYDKYWSFNGMDYWGQGTTVTVSS

SEQ ID NO: 291 - protein, 121 aa, Artificial Sequence
  source: /note="Description of Artificial Sequence: Synthetic polypeptide"
EVQLVQSGAEVKKPGSSVKVSCKASGYTFDDYEIHWVRQAPGQGLEWIGVNDPESGGTFYNQKFDGRATLTADKSTSTAYMELSSLRSEDTAVYYCTRYDKWESFNGMDYWGQGTTVTVSS

SEQ ID NO: 292 - protein, 121 aa, Artificial Sequence
  source: /note="Description of Artificial Sequence: Synthetic polypeptide"
EVQLVQSGAEVKKPGSSVKVSCKASGYTFDDYEIHWVRQAPGQGLEWMGVNDPESGGTLYNQKFDGRVTITADKSTSTAYMELSSLRSEDTAVYYCTRYYKYWSFLGMDYWGQGTTVTVSS

SEQ ID NO: 293 - protein, 121 aa, Artificial Sequence
  source: /note="Description of Artificial Sequence: Synthetic polypeptide"
EVQLVQSGAEVKKPGSSVKVSCKASGYTFEDYEIHWVRQAPGQGLEWIGVNDPESGGTFYNQKFDGRATLTADKSTSTAYMELSSLRSEDTAVYYCTRYDKWDSFYGMDYWGQGTTVTVSS

SEQ ID NO: 294 - protein, 121 aa, Artificial Sequence
  source: /note="Description of Artificial Sequence: Synthetic polypeptide"
EVQLVQSGAEVKKPGSSVKVSCKASGYTFTDYEIHWVRQAPGQGLEWMGVNDPESGGTLYNQKFDGRVTITADESTSTAYMELSSLRSEDTAVYYCTRYDKWDSFYGMDYWGQGTTVTVSS

SEQ ID NO: 295 - protein, 121 aa, Artificial Sequence
  source: /note="Description of Artificial Sequence: Synthetic polypeptide"
EVQLVQSGAEVKKPGSSVKVSCKASGYTFSDYEIHWVRQAPGQGLEWMGVNDPESGGTFYNQKFDGRVTLTADESTSTAYMELSSLRSEDTAVYYCTRYDKWESFAGMDYWGQGTTVTVSS

SEQ ID NO: 296 - protein, 121 aa, Artificial Sequence
  source: /note="Description of Artificial Sequence: Synthetic polypeptide"
EVQLVQSGAEVKKPGSSVKVSCKASGYTFSDYEIHWVRQAPGQGLEWMGVNDPESGGTFYNQKFDGRVTLTADESTSTAYMELSSLRSEDTAVYYCTRYSKWDSFQGMDYWGQGTTVTVSS

SEQ ID NO: 297 - protein, 121 aa, Artificial Sequence
  source: /note="Description of Artificial Sequence: Synthetic polypeptide"
EVQLVQSGAEVKKPGSSVKVSCKASGYTFTDYEIHWVRQAPGQGLEWMGVNDPESGGTFYNQKFDGRVTLTADESTSTAYMELSSLRSEDTAVYYCTRYDKWDSFYGMDYWGQGTTVTVSS

SEQ ID NO: 298 - protein, 121 aa, Artificial Sequence; identical to SEQ ID NO: 271
  source: /note="Description of Artificial Sequence: Synthetic polypeptide"

SEQ ID NO: 299 - protein, 121 aa, Artificial Sequence
  source: /note="Description of Artificial Sequence: Synthetic polypeptide"
EVQLVQSGAEVKKPGSSVKVSCKASGYTFTDYEIHWVRQAPGQGLEWIGVNDPESGGTFYNQKFDGRVTLTADESTSTAYMELSSLRSEDTAVYYCTRYDKWDSFYGMDCWGQGTTVTVSS

SEQ ID NO: 300 - protein, 121 aa, Artificial Sequence
  source: /note="Description of Artificial Sequence: Synthetic polypeptide"
EVQLVQSGAEVKKPGSSVKVSCKASGYTFDDYEIHWVRQAPGQGLEWIGVNDPESGGTFYNQKFDGRATLTADKSTSTAYMELSSLRSEDTAVYYCTRYDRWDSFNGMDEWGQGTTVTVSS

SEQ ID NO: 301 - protein, 121 aa, Artificial Sequence
  source: /note="Description of Artificial Sequence: Synthetic polypeptide"
EVQLVQSGAEVKKPGSSVKVSCKASGYTFTDYEIHWVRQAPGQGLEWMGVNDPESGGTLYNQKFDGRVTITADESTSTAYMELSSLRSEDTAVYYCTRYDKWYSFEGMDIWGQGTTVTVSS

SEQ ID NO: 302 - protein, 121 aa, Artificial Sequence
  source: /note="Description of Artificial Sequence: Synthetic polypeptide"
EVQLVQSGAEVKKPGSSVKVSCKASGYTFTDYEIHWVRQAPGQGLEWIGVNDPESGGTFYNQKFDGRATLTADESTSTAYMELSSLRSEDTAVYYCTRYDKWDSFYGMDYWGQGTTVTVSS

SEQ ID NO: 303 - protein, 121 aa, Artificial Sequence
  source: /note="Description of Artificial Sequence: Synthetic polypeptide"
EVQLVQSGAEVKKPGSSVKVSCKASGYTFNDYEIHWVRQAPGQGLEWMGVIDPESGGTLYNQKFDGRATITADESTSTAYMELSSLRSEDTAVYYCTRYDKWYSFEGMDIWGQGTTVTVSS

SEQ ID NO: 304 - protein, 121 aa, Artificial Sequence
  source: /note="Description of Artificial Sequence: Synthetic polypeptide"
EVQLVQSGAEVKKPGSSVKVSCKASGYTFTDYEIHWVRQAPGQGLEWMGVNDPESGGTFYNQKFDGRVTLTADESTSTAYMELSSLRSEDTAVYYCTRYSKWDSFLGMDYWGQGTTVTVSS

SEQ ID NO: 305 - protein, 121 aa, Artificial Sequence
  source: /note="Description of Artificial Sequence: Synthetic polypeptide"
EVQLVQSGAEVKKPGSSVKVSCKASGYTFADYEIHWVRQAPGQGLEWIGVNDPESGGTFYNQKFDGRATLTADESTSTAYMELSSLRSEDTAVYYCTRYDKWDSFYGMDCWGQGTTVTVSS

SEQ ID NO: 306 - protein, 121 aa, Artificial Sequence
  source: /note="Description of Artificial Sequence: Synthetic polypeptide"
EVQLVQSGAEVKKPGSSVKVSCKASGYTFTDYEIHWVRQAPGQGLEWIGVNDPESGGTFYNQKFDGRVTLTADKSTSTAYMELSSLRSEDTAVYYCTRYDKYWSFYGMDYWGQGTTVTVSS

SEQ ID NO: 307 - protein, 121 aa, Artificial Sequence
  source: /note="Description of Artificial Sequence: Synthetic polypeptide"
EVQLVQSGAEVKKPGSSVKVSCKASGYTFTDYEIHWVRQAPGQGLEWMGVNDPESGGTFYNQKFDGRVTLTADESTSTAYMELSSLRSEDTAVYYCTRYDKFWSFNGMDYWGQGTTVTVSS

SEQ ID NO: 308 - protein, 121 aa, Artificial Sequence; identical to SEQ ID NO: 291
  source: /note="Description of Artificial Sequence: Synthetic polypeptide"

SEQ ID NO: 309 - protein, 121 aa, Artificial Sequence
  source: /note="Description of Artificial Sequence: Synthetic polypeptide"
EVQLVQSGAEVKKPGSSVKVSCKASGYTFEDYEIHWVRQAPGQGLEWMGVNDPESGGTFYNQKFDGRVTLTADESTSTAYMELSSLRSEDTAVYYCTRYSKWDSFDGMDYWGQGTTVTVSS

SEQ ID NO: 310 - protein, 121 aa, Artificial Sequence
  source: /note="Description of Artificial Sequence: Synthetic polypeptide"
EVQLVQSGAEVKKPRSSVKVSCKASGYTFDDYEIHWVRQAPGQGLEWIGVNDPESGGTFYNQKFDGRATLTADKSTSTAYMELSSLRSEDTAVYYCTRYDKWESFNGMDYWGQGTTVTISS

SEQ ID NO: 311 - protein, 121 aa, Artificial Sequence
  source: /note="Description of Artificial Sequence: Synthetic polypeptide"
EVQLVQSGAEVKKPGSSVKVSCKASGYTFDDYEIHWVRQAPGQGLEWIGVNDPESGGTFYNQKFDGRATLTADKSTSTAYMELSSLRSEDTAVYYCTRYDKWESFDGMDYWGQGTTVTVSS

SEQ ID NO: 312 - protein, 121 aa, Artificial Sequence; identical to SEQ ID NO: 30
  source: /note="Description of Artificial Sequence: Synthetic polypeptide"

SEQ ID NO: 313 - protein, 121 aa, Artificial Sequence
  source: /note="Description of Artificial Sequence: Synthetic polypeptide"
EVQLVQSGAEVKKPGSSVKVSCKASGYTFSDYEIHWVRQAPGQGLEWMGVNDPESGGTFYNQKFDGRVTLTADESTSTAYMELSSLRSEDTAVYYCTRYDKWESFSGMDHWGQGTTVTVSS

SEQ ID NO: 314 - protein, 121 aa, Artificial Sequence; identical to SEQ ID NO: 30
  source: /note="Description of Artificial Sequence: Synthetic polypeptide"

SEQ ID NO: 315 - protein, 121 aa, Artificial Sequence
  source: /note="Description of Artificial Sequence: Synthetic polypeptide"
EVQLVQSGAEETKPGSSVKVSCKASGYTFTDYEIHWVRQAPGQGLEWMGVNDPESGGTFYNQKFDGRVTLTADESTSTAYMELSSLRSEDTAVYYCTRYSKWDSFDGMDYWGQGTTVTVSS

SEQ ID NO: 316 - protein, 121 aa, Artificial Sequence; identical to SEQ ID NO: 30
  source: /note="Description of Artificial Sequence: Synthetic polypeptide"

SEQ ID NO: 317 - protein, 121 aa, Artificial Sequence; identical to SEQ ID NO: 109
  source: /note="Description of Artificial Sequence: Synthetic polypeptide"

SEQ ID NO: 318 - protein, 106 aa, Artificial Sequence
  source: /note="Description of Artificial Sequence: Synthetic polypeptide"
DIQMTQSPSSLSASVGDRVTITCSASSSISYIYWFQQKPGKSPKLWIYATFELASGVPSRFSGSGSGTDYTLTISSLQPEDFATYYCHQRSSYPWTFGQGTKLEIK

SEQ ID NO: 319 - protein, 106 aa, Artificial Sequence
  source: /note="Description of Artificial Sequence: Synthetic polypeptide"
DIQMTQSPSSLSASVGDRVTITCSASSSISYIYWFQQKPGKSPKRWIYATFELASGVPSRFSGSGSGTDYTLTISSLQPEDFATYYCQQRSSYPWTFGQGTKLEIK

SEQ ID NO: 320 - protein, 106 aa, Artificial Sequence
  source: /note="Description of Artificial Sequence: Synthetic polypeptide"
DIQMTQSPSSLSASVGDRVTITCSASSSISYIYWFQQKPGKSPKRWIYATFELASGVPSRFSGSGSGTDYTLTISSLQPEDFATYYCNQRSSYPWTFGQGTKLEIK

SEQ ID NO: 321 - protein, 106 aa, Artificial Sequence
  source: /note="Description of Artificial Sequence: Synthetic polypeptide"
DIQMTQSPSSLSASVGDRVTITCSASSSISYIYWFQQKPGKSPKRWIYATFELASGVPSRFSGSGSGTDYTLTISSLQPEDFATYYCHQRSSYPWTFGQGTKLEIK

SEQ ID NO: 322 - protein, 106 aa, Artificial Sequence
  source: /note="Description of Artificial Sequence: Synthetic polypeptide"
DIQMTQSPSSLSASVGDRVTITCSASSSISYIYWFQQKPGKAPKRLIYATSELASGVPSRFSGSGSGTDYTLTISSLQPEDFATYYCHQRSSYPFTFGQGTKLEIK

SEQ ID NO: 323 - protein, 106 aa, Artificial Sequence
  source: /note="Description of Artificial Sequence: Synthetic polypeptide"
DIQMTQSPSSLSASVGDRVTITCSASSSVRYIYWFQQKPGKSPKRLIYATSDLASGVPSRFSGSGSGTDFTLTISSLQPEDFATYYCHQRSSYPFTFGQGTKLEIK

SEQ ID NO: 324 - protein, 106 aa, Artificial Sequence
  source: /note="Description of Artificial Sequence: Synthetic polypeptide"
DIQMTQSPSSLSASVGDRVTITCSASSSISYIYWFQQKPGKSPKRWIYATSELASGVPSRFSGSGSGTDYTLTISSLQPEDFATYYCHQRSSYPWTFGQGTKLEIK

SEQ ID NO: 325 - protein, 106 aa, Artificial Sequence
  source: /note="Description of Artificial Sequence: Synthetic polypeptide"
DIQMTQSPSSLSASVGDRVTITCSASSSISYIYWFQQKPGKAPKRLIYATSELASGVPSRFSGSGSGTDYTLTISSLQPEDFATYYCHQRSSYPWTFGQGTKLEIK

SEQ ID NO: 326 - protein, 106 aa, Artificial Sequence; identical to SEQ ID NO: 321
  source: /note="Description of Artificial Sequence: Synthetic polypeptide"

SEQ ID NO: 327 - protein, 106 aa, Artificial Sequence; identical to SEQ ID NO: 321
  source: /note="Description of Artificial Sequence: Synthetic polypeptide"

SEQ ID NO: 328 - protein, 106 aa, Artificial Sequence
  source: /note="Description of Artificial Sequence: Synthetic polypeptide"
DIQMTQSPSSLSASVGDRVTITCSASSSISYIYWFQQKPGKSPKRWIYATFELASGVPSRFSGSGSGTDYTLTISSLQPEDFATYYCHQRSSYPWTFGQGIKLEIK

SEQ ID NO: 329 - protein, 106 aa, Artificial Sequence
  source: /note="Description of Artificial Sequence: Synthetic polypeptide"
DIQMTQSPSSLSASVGDRVTITCSASQSVSYIYWFQQKPGKAPKRLIYATSELASGVPSRFSGSGSGTDYTLTISSLQPEDFATYYCHQRSYYPLTFGQGTKLEIK

SEQ ID NO: 330 - protein, 106 aa, Artificial Sequence
  source: /note="Description of Artificial Sequence: Synthetic polypeptide"
DIQMTQSPSSLSASVGDRVTITCSASSIINYIYWFQQKPGKAPKRLIYATSELASGVPSRFSGSGSGTDYTLTISSLQPEDFATYYCHQRSSYPPTFGQGTKLEIK

SEQ ID NO: 331 - protein, 106 aa, Artificial Sequence
  source: /note="Description of Artificial Sequence: Synthetic polypeptide"
DIQMTQSPSSLSASVGDRVTITCSASQSISPIYWFQQKPGKAPKRLIYTTSELASGVPSRFSGSGSGTDYTLTISSLQPEDFATYYCQQRSSYPITFGQGTKLEIK

SEQ ID NO: 332 - protein, 106 aa, Artificial Sequence
  source: /note="Description of Artificial Sequence: Synthetic polypeptide"
DIQMTQSPSSLSASVGDRVTITCRASQSISYLYWFQQKPGKSPKRLIYATSELASGVPSRFSGSGSGTDYTLTISSLQPEDFATYYCQQRSSYPLTFGQGTKLEIK

SEQ ID NO: 333 - protein, 106 aa, Artificial Sequence
  source: /note="Description of Artificial Sequence: Synthetic polypeptide"
DIQMTQSPSSLSASVGDRVTITCSASSIISYIYWFQQKPGKAPKRLIYTTFELASGVPSRFSGSGSGTDYTLTISSLQPEDFATYYCNQRSSYPYTFGQGTKLEIK

SEQ ID NO: 334 - protein, 106 aa, Artificial Sequence
  source: /note="Description of Artificial Sequence: Synthetic polypeptide"
DIQMTQSPSSLSASVGDRVTITCRASQSISYLYWFQQKPGKAPKRLIYATSELASGVPSRFSGSGSGTDFTLTISSLQPEDFATYYCQQRRIYPPTFGQGTKLEIK

SEQ ID NO: 335 - protein, 106 aa, Artificial Sequence
  source: /note="Description of Artificial Sequence: Synthetic polypeptide"
DIQMTQSPSSLSASVGDRVTITCSASSSIRYIYWFQQKPGKAPKRLIYATFELASGVPSRFSGSGSGTDFTLTISSLQPEDFATYYCQQRSSYPLTFGQGTKLEIK

SEQ ID NO: 336 - protein, 106 aa, Artificial Sequence
  source: /note="Description of Artificial Sequence: Synthetic polypeptide"
DIQMTQSPSSLSASVGDRVTITCRASQSISYLYWFQQKPGKSPKRWIYATSELASGVPSRFSGSGSGTDFTLTISSLQPEDFATYYCQQRSNYPLTFGQGTKLEIK

SEQ ID NO: 337 - protein, 106 aa, Artificial Sequence
  source: /note="Description of Artificial Sequence: Synthetic polypeptide"
DIQMTQSPSSLSASVGDRVTITCSASQSISYIYWFQQKPGKSPKRLIYATSELASGVPSRFSGSGSGTDYTLTISSLQPEDFATYYCQQRSSYPYTFGQGTKLEIK

SEQ ID NO: 338 - protein, 106 aa, Artificial Sequence
  source: /note="Description of Artificial Sequence: Synthetic polypeptide"
DIQMTQSPSSLSASVGDRVTITCRASSSISYLYWFQQKPGKAPKRWIYGTFELASGVPSRFSGSGSGTDYTLTISSLQPEDFATYYCQQRSSYPYTFGQGTKLEIK

SEQ ID NO: 339 - protein, 106 aa, Artificial Sequence
  source: /note="Description of Artificial Sequence: Synthetic polypeptide"
DIQMTQSPSSLSASVGDRVTITCRASSSISYLYWFQQKPGKSPKRWIYATSELASGVPSRFSGSGSGTDFTLTISSLQPEDFATYYCQQRSSYPLTFGQGTKLEIK

SEQ ID NO: 340 - protein, 106 aa, Artificial Sequence
  source: /note="Description of Artificial Sequence: Synthetic polypeptide"
DIQMTQSPSSLSASVGDRVTITCSASQSLTYIYWFQQKPGKAPKRLIYATSELASGVPSRFSGSGSGTDFTLTISSLQPEDFATYYCQQRSSYPPTFGQGTKLEIK

SEQ ID NO: 341 - protein, 106 aa, Artificial Sequence
  source: /note="Description of Artificial Sequence: Synthetic polypeptide"
DIQMTQSPSSLSASVGDRVTITCSASQSISYLYWFQQKPGKAPKRLIYATSELASGVPSRFSGSGSGTDFTLTISSLQPEDFATYYCQQRSSYPLTFGQGTKLEIK

SEQ ID NO: 342 - protein, 106 aa, Artificial Sequence
  source: /note="Description of Artificial Sequence: Synthetic polypeptide"
DIQMTQSPSSLSASVGDRVTITCSASSSIRYIYWFQQKPGKAPKRLIYETSDLQSGVPSRFSGSGSGTDFTLTISSLQPEDFATYYCQQRSYYPLTFGQGTKLEIK

SEQ ID NO: 343 - protein, 106 aa, Artificial Sequence
  source: /note="Description of Artificial Sequence: Synthetic polypeptide"
DIQMTQSPSSLSASVGDRVTITCSASSSISYIYWFQQKPGKSPKRLIYSTFELQSGVPSRFSGSGSGTDFTLTISSLQPEDFATYYCQQRSFYPLTFGQGTKLEIK

SEQ ID NO: 344 - protein, 106 aa, Artificial Sequence
  source: /note="Description of Artificial Sequence: Synthetic polypeptide"
DIQMTQSPSSLSASVGDRVTITCSASSIISYIYWFQQKPGKSPKRLIYATSELASGVPSRFSGSGSGTDYTLTISSLQPEDFATYYCHQRSWYPLTFGQGTKLEIK

SEQ ID NO: 345 - protein, 106 aa, Artificial Sequence
  source: /note="Description of Artificial Sequence: Synthetic polypeptide"
DIQMTQSPSSLSASVGDRVTITCSASSSIRYIYWFQQKPGKAPKRLIYATSELASGVPSRFSGSGSGTDFTLTISSLQPEDFATYYCQQRSSYPLTFGQGTKLEIK

SEQ ID NO: 346 - protein, 106 aa, Artificial Sequence
  source: /note="Description of Artificial Sequence: Synthetic polypeptide"
DIQMTQSPSSLSASVGDRVTITCSASQSIRYLYWFQQKPGKSPKRLIYATSELASGVPSRFSGSGSGTDFTLTISSLQPEDFATYYCHQRTRYPFTFGQGTKLEIK

SEQ ID NO: 347 - protein, 106 aa, Artificial Sequence
  source: /note="Description of Artificial Sequence: Synthetic polypeptide"
DIQMTQSPSSLSASVGDRVTITCRASSSISYLYWFQQKPGKSPKRLIYSTSGLASGVPSRFSGSGSGTDYTLTISSLQPEDFATYYCNQRSYYPITFGQGTKLEIK

SEQ ID NO: 348 - protein, 106 aa, Artificial Sequence
  source: /note="Description of Artificial Sequence: Synthetic polypeptide"
DIQMTQSPSSLSASVGDRVTITCRASSIISYIYWFQQKPGKAPKRWIYATSELASGVPSRFSGSGSGTDYTLTISSLQPEDFATYYCQQRSTYPLTFGQGTKLEIK

SEQ ID NO: 349 - protein, 106 aa, Artificial Sequence
  source: /note="Description of Artificial Sequence: Synthetic polypeptide"
DIQMTQSPSSLSASVGDRVTITCSASSSVSYIYWFQQKPGKAPKRWIYATSELASGVPSRFSGSGSGTDFTLTISSLQPEDFATYYCQQRSSYPLTFGQGTKLEIK

SEQ ID NO: 350 - protein, 106 aa, Artificial Sequence
  source: /note="Description of Artificial Sequence: Synthetic polypeptide"
DIQMTQSPSSLSASVGDRVTITCSASSIISYIYWFQQKPGKAPKRLIYATSELASGVPSRFSGSGSGTDYTLTISSLQPEDFATYYCHQRSSYPYTFGQGTKLEIK

SEQ ID NO: 351 - protein, 106 aa, Artificial Sequence
  source: /note="Description of Artificial Sequence: Synthetic polypeptide"
DIQMTQSPSSLSASVGDRVTITCSASSIMNYIYWFQQKPGKAPKRWIYATSELASGVPSRFSGSGSGTDFTLTISSLQPEDFATYYCVQWSLYPPTFGQGTKLEIK

SEQ ID NO: 352 - protein, 106 aa, Artificial Sequence
  source: /note="Description of Artificial Sequence: Synthetic polypeptide"
DIQMTQSPSSLSASVGDRVTITCSASQSIGYLYWFQQKPGKAPKRLIYATSELASGVPSRFSGSGSGTDFTLTISSLQPEDFATYYCQQRSSYPLTFGQGTKLEIK

SEQ ID NO: 353 - protein, 106 aa, Artificial Sequence
  source: /note="Description of Artificial Sequence: Synthetic polypeptide"
DIQMTQSPSSLSASVGDRVTITCRASSIISYIYWFQQKPGKAPKRWIYATFELASGVPSRFSGSGSGTDYTLTISSLQPEDFATYYCHQRSSYPCTFGQGTKLEIK

SEQ ID NO: 354 - protein, 106 aa, Artificial Sequence
  source: /note="Description of Artificial Sequence: Synthetic polypeptide"
DIQMTQSPSSLSASVGDRVTITCRASSSISYLYWFQQKPGKAPKRLIYATSELASGVPSRFSGSGSGTDFTLTISSLQPEDFATYYCHQRSRYPFTFGQGTKLEIK

SEQ ID NO: 355 - protein, 106 aa, Artificial Sequence
  source: /note="Description of Artificial Sequence: Synthetic polypeptide"
DIQMTQSPSSLSASVGDRVTITCSASSSISYLYWFQQKPGKSPKRWIYATSELASGVPSRFSGSGSGTDFTLTISSLQPEDFATYYCHQRSSYPWTFGQGTKLEIK

SEQ ID NO: 356 - protein, 106 aa, Artificial Sequence
  source: /note="Description of Artificial Sequence: Synthetic polypeptide"
DIQMTQSPSSLSASVGDRVTITCSASSSIRYIYWFQQKPGKAPKRWIYATSELASGVPSRFSGSGSGTDFTLTISSLQPEDFATYYCQQRSSYPYTFGQGTKLEIK

SEQ ID NO: 357 - protein, 106 aa, Artificial Sequence
  source: /note="Description of Artificial Sequence: Synthetic polypeptide"
DIQMTQSPSSLSASVGDRVTITCRASSSISYIYWFQQKPGKSPKRWIYATSELASGVPSRFSGSGSGTDYTLTISSLQPEDFATYYCQQRSSYPITFGQGTKLEIK

SEQ ID NO: 358 - protein, 106 aa, Artificial Sequence
  source: /note="Description of Artificial Sequence: Synthetic polypeptide"
DIQMTQSPSSLSASVGDRVTITCRASQSISYLYWFQQKPGKSPKRLIYATSELASGVPSRFSGSGSGTDFTLTISSLQPEDFATYYCHQRSSYPYTFGQGTKLEIK

SEQ ID NO: 359 - protein, 106 aa, Artificial Sequence
  source: /note="Description of Artificial Sequence: Synthetic polypeptide"
DIQMTQSPSSLSASVGDRVTITCSASSSISYLYWFQQKPGKAPKRLIYATSELASGVPSRFSGSGSGTDYTLTISSLQPEDFATYYCNQRSSYPYTFGQGTKLEIK

SEQ ID NO: 360 - protein, 106 aa, Artificial Sequence
  source: /note="Description of Artificial Sequence: Synthetic polypeptide"
DIQMTQSPSSLSASVGDRVTITCSASQSISYIYWFQQKPGKAPKRWIYATSELASGVPSRFSGSGSGTDFTLTISSLQPEDFATYYCNQRSSYPYTFGQGTKLEIK

SEQ ID NO: 361 - protein, 106 aa, Artificial Sequence
  source: /note="Description of Artificial Sequence: Synthetic polypeptide"
DIQMTQSPSSLSASVGDRVTITCSASQIIGYIYWFQQKPGKAPKRWIYATSELASGVPSRFSGSGSGTDYTLTISSLQPEDFATYYCQQRSSYPLTFGQGTKLEIK

SEQ ID NO: 362 - protein, 106 aa, Artificial Sequence
  source: /note="Description of Artificial Sequence: Synthetic polypeptide"
DIQMTQSPSSLSASVGDRVTITCSASQSINYIDWFQQKPGKAPKRWIYATFELASGVPSRFSGSGSGTDYTLTISSLQPEDFATYYCLQRNNYPPTFGQGTKLEIK

SEQ ID NO: 363 - protein, 106 aa, Artificial Sequence
  source: /note="Description of Artificial Sequence: Synthetic polypeptide"
DIQMTQSPSSLSASVGDRVTITCSASSSISYIYWFQQKPGKSPKRLIYSTSELQSGVPSRFSGSGSGTDFTLTISSLQPEDFATYYCQQRTSYPITFGQGTKLEIK

SEQ ID NO: 364 - protein, 106 aa, Artificial Sequence
  source: /note="Description of Artificial Sequence: Synthetic polypeptide"
DIQMTQSPSSLSASVGDRVTITCRASSSISYLYWFQQKPGKSPKRLIYATSELQSGVPSRFSGSGSGTDYTLTISSLQPEDFATYYCQQRSSYPITFGQGTKLEIK

SEQ ID NO: 365 - protein, 106 aa, Artificial Sequence
  source: /note="Description of Artificial Sequence: Synthetic polypeptide"
DIQMTQSPSSLSASVGDRVTITCSASSSISYLYWFQQKPGKSPKRLIYATSELASGVPSRFSGSGSGTDFTLTISSLQPEDFATYYCQQRSLYPITFGQGTKLEIK

SEQ ID NO: 366 - protein, 106 aa, Artificial Sequence
  source: /note="Description of Artificial Sequence: Synthetic polypeptide"
DIQMTQSPSSLSASVGDRVTITCSASQSVRYIYWFQQKPGKAPKRWIYETSELASGVPSRFSGSGSGTDFTLTISSLQPEDFATYYCQQRSSYPLTFGQGTKLEIK

SEQ ID NO: 367 - protein, 106 aa, Artificial Sequence
  source: /note="Description of Artificial Sequence: Synthetic polypeptide"
DIQMTQSPSSLSASVGDRVTITCRASSSISYLYWFQQKPGKSPKRLIYTTFDLASGVPSRFSGSGSGTDFTLTISSLQPEDFATYYCQQRSSYPWTFGQGTKLEIK

SEQ ID NO: 368 - protein, 106 aa, Artificial Sequence
  source: /note="Description of Artificial Sequence: Synthetic polypeptide"
DIQMTQSPSSLSASVGDRVTITCSASQSISYIYWFQQKPGKAPKRLIYSTSELQSGVPSRFSGSGSGTDFTLTISSLQPEDFATYYCQQRSSYPITFGQGTKLEIK

SEQ ID NO: 369 - protein, 106 aa, Artificial Sequence
  source: /note="Description of Artificial Sequence: Synthetic polypeptide"
DIQMTQSPSSLSASVGDRVTITCSASSSISYIYWFQQKPGKAPKRWIYATSELASGVPSRFSGSGSGTDYTLTISSLQPEDFATYYCQQRSSYPLTFGQGTKLEIK

SEQ ID NO: 370 - protein, 106 aa, Artificial Sequence
  source: /note="Description of Artificial Sequence: Synthetic polypeptide"
DIQMTQSPSSLSASVGDRVTITCSASSSISYLYWFQQKPGKSPKRLIYATFELASGVPSRFSGSGSGTDFTLTISSLQPEDFATYYCQQRSSYPLTFGQGTKLEIK

SEQ ID NO: 371 - protein, 106 aa, Artificial Sequence
  source: /note="Description of Artificial Sequence: Synthetic polypeptide"
DIQMTQSPSSLSASVGDRVTITCSASQIMSYIYWFQQKPGKAPKRWIYATSELASGVPSRFSGSGSGTDYTLTISSLQPEDFATYYCQQRSSYPITFGQGTKLEIK

SEQ ID NO: 372 - protein, 106 aa, Artificial Sequence
  source: /note="Description of Artificial Sequence: Synthetic polypeptide"
DIQMTQSPSSLSASVGDRVTITCSASQIINDLFWFQQKPGKAPKRLIYDTFDLQSGVPSRFSGSGSGTDFTLTISSLQPEDFATYYCQQRTHYPITFGQGTKLEIK

SEQ ID NO: 373 - protein, 106 aa, Artificial Sequence
  source: /note="Description of Artificial Sequence: Synthetic polypeptide"
DIQMTQSPSSLSASVGDRVTITCRASQSISYIYWFQQKPGKAPKRWIYATFELASGVPSRFSGSGSGTDYTLTISSLQPEDFATYYCQQRSSYPLTFGQGTKLEIK

SEQ ID NO: 374 - protein, 106 aa, Artificial Sequence
  source: /note="Description of Artificial Sequence: Synthetic polypeptide"
DIQMTQSPSSLSASVGDRVTITCSASQSISYIYWFQQKPGKAPKRLIYGTFDLASGVPSRFSGSGSGTDYTLTISSLQPEDFATYYCQQRSSYPITFGQGTKLEIK

SEQ ID NO: 375 - protein, 106 aa, Artificial Sequence
  source: /note="Description of Artificial Sequence: Synthetic polypeptide"
DIQMTQSPSSLSASVGDRVTITCSASSSISYLYWFQQKPGKAPKRWIYATSELASGVPSRFSGSGSGTDFTLTISSLQPEDFATYYCAQRSGYPYTFGQGTKLEIK

SEQ ID NO: 376 - protein, 106 aa, Artificial Sequence
  source: /note="Description of Artificial Sequence: Synthetic polypeptide"
DIQMTQSPSSLSASVGDRVTITCRASQSIRYIYWFQQKPGKSPKRWIYATSELASGVPSRFSGSGSGTDYTLTISSLQPEDFATYYCQQRSSYPYTFGQGTKLEIK

SEQ ID NO: 377 - protein, 106 aa, Artificial Sequence
  source: /note="Description of Artificial Sequence: Synthetic polypeptide"
DIQMTQSPSSLSASVGDRVTITCRASQSLSYIYWFQQKPGKAPKRWIYATSELASGVPSRFSGSGSGTDYTLTISSLQPEDFATYYCHQRNFYPLTFGQGTKLEIK

SEQ ID NO: 378 - protein, 106 aa, Artificial Sequence
  source: /note="Description of Artificial Sequence: Synthetic polypeptide"
DIQMTQSPSSLSASVGDRVTITCSASQIISYIYWFQQKPGKAPKRLIYGTSQLASGVPSRFSGSGSGTDFTLTISSLQPEDFATYYCQQRSRYPLTFGQGTKLEIK

SEQ ID NO: 379 - protein, 106 aa, Artificial Sequence
  source: /note="Description of Artificial Sequence: Synthetic polypeptide"
DIQMTQSPSSLSASVGDRVTITCSASQSISYIYWFQQKPGKAPKRLIYATSDLQSGVPSRFSGSRSGTDFTLTISSLQPEDFATYYCQQRSSYPLTFGQGTKLEIK

SEQ ID NO: 380 - protein, 106 aa, Artificial Sequence
  source: /note="Description of Artificial Sequence: Synthetic polypeptide"
DIQMTQSPSSLSASVGDRVTITCRASQSISYIYWFQQKPGKAPKRLIYATSELASGVPSRFSGSGSGTDFTLTISSLQPEDFATYYCQQRSLYPLTFGQGTKLEIK

SEQ ID NO: 381 - protein, 106 aa, Artificial Sequence
  source: /note="Description of Artificial Sequence: Synthetic polypeptide"
DIQMTQSPSSLSASVGDRVTITCRASQSLSYIYWFQQKPGKSPKRWIYATSELASGVPSRFSGSGSGTDYTLTISSLQPEDFATYYCHQRSWYPLTFGQGTKLEIK

SEQ ID NO: 382 - protein, 106 aa, Artificial Sequence
  source: /note="Description of Artificial Sequence: Synthetic polypeptide"
DIQMTQSPSSLSASVGDRVTITCRASSSINYLYWFQQKPGKSPKRLIYATFELASGVPSRFSGSGSGTDYTLTISSLQPEDFATYYCNQRSNYPYTFGQGTKLEIK

SEQ ID NO: 383 - protein, 106 aa, Artificial Sequence
  source: /note="Description of Artificial Sequence: Synthetic polypeptide"
DIQMTQSPSSLSASVGDRVTITCRASSIINYIYWFQQKPGKAPKRWIYATSELASGVPSRFSGSGSGTDYTLTISSLQPEDFATYYCQQRSIYPLTFGQGTKLEIK

SEQ ID NO: 384 - protein, 106 aa, Artificial Sequence
  source: /note="Description of Artificial Sequence: Synthetic polypeptide"
DIQMTQSPSSLSASVGDRVTITCRASSSISYIYWFQQKPGKAPKRWIYATSELASGVPSRFSGSGSGTDFTLTISSLQPEDFATYYCQQRSIYPITFGQGTKLEIK

SEQ ID NO: 385 - protein, 106 aa, Artificial Sequence
  source: /note="Description of Artificial Sequence: Synthetic polypeptide"
DIQMTQSPSSLSASVGDRVTITCSASSSISYIYWFQQKPGKSPKRWIYATSLLASGVPSRFSGSGSGTDFTLTISSLQPEDFATYYCLQRSRYPPTFGQGTKLEIK

SEQ ID NO: 386 - protein, 106 aa, Artificial Sequence
  source: /note="Description of Artificial Sequence: Synthetic polypeptide"
DIQMTQSPSSLSASVGDRVTITCRASSIISYIDWYQQKPGKAPKRWIYATFELASGVPSRFSGSGSGTDYTLTISSLQPEDFATYYCLQRSIYPPTFGQGTKLEIK

SEQ ID NO: 387 - protein, 106 aa, Artificial Sequence
  source: /note="Description of Artificial Sequence: Synthetic polypeptide"
DIQMTQSPSSLSASVGDRVTITCRASSSISYLYWFQQKPGKAPKRLIYATSELASGVPSRFSGSGSGTDFTLTISSLQPEDFATYYCQQRSIYPLTFGQGTKLEIK

SEQ ID NO: 388 - protein, 106 aa, Artificial Sequence
  source: /note="Description of Artificial Sequence: Synthetic polypeptide"
DIQMTQSPSSLSASVGDRVTITCSASSSLSYIYWFQQKPGKAPKRWIYATSELASGVPSRFSGSGSGTDYTLTISSLQPEDFATYYCQQRSNYPITFGQGTKLEIK

SEQ ID NO: 389 - protein, 106 aa, Artificial Sequence
  source: /note="Description of Artificial Sequence: Synthetic polypeptide"
DIQMTQSPSSLSASVGDRVTITCRASSILSYIYWFQQKPGKAPKRLIYATSELASGVPSRFSGSGSGTDFTLTISSLQPEDFATYYCQQRSSYPWTFGQGTKLEIK

SEQ ID NO: 390 - protein, 106 aa, Artificial Sequence
  source: /note="Description of Artificial Sequence: Synthetic polypeptide"
DIQMTQSPSSLSASVGDRVTITCSASSSISYIYWFQQKPGKSPKRLIYATSELASGVPSRFSGSGSGTDYTLTISSLQPEDFATYYCQQRSSYPLTFGQGTKLEIK

SEQ ID NO: 391 - protein, 106 aa, Artificial Sequence
  source: /note="Description of Artificial Sequence: Synthetic polypeptide"
DIQMTQSPSSLSASVGDRVTITCSASSSISYLYWFQQKPGKAPKRLIYATSELASGVPSRFSGSGSGTDYTLTISSLQPEDFATYYCQQRSIYPLTFGQGTKLEIK

SEQ ID NO: 392 - protein, 106 aa, Artificial Sequence
  source: /note="Description of Artificial Sequence: Synthetic polypeptide"
DIQMTQSPSSLSASVGDRVTITCSASSSISYIYWFQQKPGKSPKRWIYATSELASGVPSRFSGSGSGTDFTLTISSLQPEDFATYYCQQRSNYPPTFGQGTKLEIK

SEQ ID NO: 393 - protein, 106 aa, Artificial Sequence
  source: /note="Description of Artificial Sequence: Synthetic polypeptide"
DIQMTQSPSSLSASVGDRVTITCSASQIISYLYWFQQKPGKAPKRLIYATSELASGVPSRFSGSGSGTDYTLTISSLQPEDFATYYCQQRSTYPLTFGQGTKLEIK

SEQ ID NO: 394 - protein, 106 aa, Artificial Sequence
  source: /note="Description of Artificial Sequence: Synthetic polypeptide"
DIQMTQSPSSLSASVGDRVTITCRASSSISYIYWFQQKPGKSPKRLIYATFELASGVPSRFSGSGSGTDFTLTISSLQPEDFATYYCQQRSSYPITFGQGTKLEIK

SEQ ID NO: 395 - protein, 106 aa, Artificial Sequence
  source: /note="Description of Artificial Sequence: Synthetic polypeptide"
DIQMTQSPSSLSASVGDRVTITCSASQSVSYIYWFQQKPGKAPKRWIYDTSELASGVPSRFSGSGSGTDFTLTISSLQPEDFATYYCLQQSIYPPTFGQGTKLEIK

SEQ ID NO: 396 - protein, 106 aa, Artificial Sequence
  source: /note="Description of Artificial Sequence: Synthetic polypeptide"
DIQMTQSPSSLSASVGDRVTITCRASSSISYIYWFQQKPGKAPKRLIYATFELASGVPSRFSGSGSGTDYTLTISSLQPEDFATYYCHQRSFYPYTFGQGTKLEIK

SEQ ID NO: 397 - protein, 106 aa, Artificial Sequence
  source: /note="Description of Artificial Sequence: Synthetic polypeptide"
DIQMTQSPSSLSASVGDRVTITCSASSSISYISWFQQKPGKSPKRWIYATSELASGVPSRFSGSGSGTDYTLTISSLQPEDFATYYCLQTAIYPPTFGQGTKLEIK

SEQ ID NO: 398 - protein, 106 aa, Artificial Sequence
  source: /note="Description of Artificial Sequence: Synthetic polypeptide"
DIQMTQSPSSLSASVGDRVTITCSASSSISYIYWFQQKPGKAPKRLIYATSELASGVPSRFSGSGSGTDFTLTISSLQPEDFATYYCNQRSSYPFTFGQGTKLEIK

SEQ ID NO: 399 - protein, 106 aa, Artificial Sequence
  source: /note="Description of Artificial Sequence: Synthetic polypeptide"
DIQMTQSPSSLSASVGDRVTITCRASQSVNYIYWFQQKPGKAPKRWIYATSELQSGVPSRFSGSGSGTDFTLTISSLQPEDFATYYCQQRSFYPLTFGQGTKLEIK

SEQ ID NO: 400 - protein, 106 aa, Artificial Sequence
  source: /note="Description of Artificial Sequence: Synthetic polypeptide"
DIQMTQSPSSLSASVGDRVTITCSASSSISYIYWFQQKPGKAPKRLIYATSELASGVPSRFSGSGSGTDYTLTISSLQPEDFATYYCHQRSSYPYTFGQGTKLEIK

SEQ ID NO: 401 - protein, 106 aa, Artificial Sequence
  source: /note="Description of Artificial Sequence: Synthetic polypeptide"
DIQMTQSPSSLSASVGDRVTITCRASSSLNYIYWFQQKPGKAPKRWIYATSELASGVPSRFSGSRSGTDFTLTISSLQPEDFATYYCQQRMYYPQTFGQGTKLEIK

SEQ ID NO: 402 - protein, 106 aa, Artificial Sequence
  source: /note="Description of Artificial Sequence: Synthetic polypeptide"
DIQMTQSPSSLSASVGDRVTITCSASQSISYIYWFQQKPGKAPKRLIYGTSELASGVPSRFSGSGSGTDFTLTISSLQPEDFATYYCQQRNSYPLTFGQGTKLEIK

SEQ ID NO: 403 - protein, 106 aa, Artificial Sequence
  source: /note="Description of Artificial Sequence: Synthetic polypeptide"
DIQMTQSPSSLSASVGDRVTITCSASSSISYIYWFQQKPGKAPKRLIYATSELASGVPSRFSGSGSGTDFTLTISSLQPEDFATYYCQQRSSYPPTFGQGTKLEIK

SEQ ID NO: 404 - protein, 106 aa, Artificial Sequence
  source: /note="Description of Artificial Sequence: Synthetic polypeptide"
DIQMTQSPSSLSASVGDRVTITCSASSSISYIYWFQQKPGKAPKRLIYATFELASGVPSRFSGSGSGTDFTLTISSLQPEDFATYYCQQRSSYPYTFGQGTKLEIK

SEQ ID NO: 405 - protein, 106 aa, Artificial Sequence
  source: /note="Description of Artificial Sequence: Synthetic polypeptide"
DIQMTQSPSSLSASVGDRVTITCSASQSISYIYWFQQKPGKSPKRWIYATSELASGVPSRFSGSGSGTDYTLTISSLQPEDFATYYCQQRSSYPLTFGQGTKLEIK

SEQ ID NO: 406 - protein, 106 aa, Artificial Sequence
  source: /note="Description of Artificial Sequence: Synthetic polypeptide"
DIQMTQSPSSLSASVGDRVTITCSASSIISYIYWFQQKPGKAPKRLIYATSELASGVPSRFSGSGSGTDFTLTISSLQPEDFATYYCQQRSIYPLTFGQGTKLEIK

SEQ ID NO: 407 - protein, 106 aa, Artificial Sequence
  source: /note="Description of Artificial Sequence: Synthetic polypeptide"
DIQMTQSPSSLSASVGDRVTITCRASQSISYLYWFQQKPGKAPKRLIYATSELASGVPSRFSGSGSGTDFTLTISSLQPEDFATYYCQQRSSYPYTFGQGTKLEIK

SEQ ID NO: 408 - protein, 106 aa, Artificial Sequence
  source: /note="Description of Artificial Sequence: Synthetic polypeptide"
DIQMTQSPSSLSASVGDRVTITCRASSSISYIYWFQQKPGKSPKRLIYATSELASGVPSRFSGSGSGTDYTLTISSLQPEDFATYYCQQRTSYPYTFGQGTKLEIK

SEQ ID NO: 409 - protein, 106 aa, Artificial Sequence
  source: /note="Description of Artificial Sequence: Synthetic polypeptide"
DIQMTQSPSSLSASVGDRVTITCSASSIVSYIYWFQQKPGKAPKRWIYATSELASGVPSRFSGSGSGTDFTLTISSLQPEDFATYYCQQRSSYPLTFGQGTKLEIK

SEQ ID NO: 410 - protein, 106 aa, Artificial Sequence
  source: /note="Description of Artificial Sequence: Synthetic polypeptide"
DIQMTQSPSSLSASVGDRVTITCSASSSISYIYWFQQKPGKSPKRLIYPTFDLQSGVPSRFSGSGSGTDFTLTISSLQPEDFATYYCQQRSMYPITFGQGTKLEIK

SEQ ID NO: 411 - protein, 106 aa, Artificial Sequence
  source: /note="Description of Artificial Sequence: Synthetic polypeptide"
DIQMTQSPSSLSASVGDRVTITCSASSSISYIYWFQQKPGKSPKRLIYATSELASGVPSRFSGSGSGTDFTLTISSLQPEDFATYYCQQRSRYPITFGQGTKLEIK

SEQ ID NO: 412 - protein, 106 aa, Artificial Sequence
  source: /note="Description of Artificial Sequence: Synthetic polypeptide"
DIQMTQSPSSLSASVGDRVTITCSASSIISYIYWFQQKPGKSPKRLIYATSELASGVPSRFSGSGSGTDYTLTISSLQPEDFATYYCQQRSSYPYTFGQGTKLEIK

SEQ ID NO: 413 - protein, 106 aa, Artificial Sequence
  source: /note="Description of Artificial Sequence: Synthetic polypeptide"
DIQMTQSPSSLSASVGDRVTITCSASQSIGYLYWFQQKPGKAPKRWIYATSELASGVPSRFSGSGSGTDYTLTISSLQPEDFATYYCQQRSSYPLTFGQGTKLEIK

SEQ ID NO: 414 - protein, 106 aa, Artificial Sequence
  source: /note="Description of Artificial Sequence: Synthetic polypeptide"
DIQMTQSPSSLSASVGDRVTITCRASSSISYIYWFQQKPGKAPKRWIYATSELASGVPSRFSGSGSGTDFTLTISSLQPEDFATYYCQQRSNYPLTFGQGTKLEIK

SEQ ID NO: 415 - protein, 106 aa, Artificial Sequence
  source: /note="Description of Artificial Sequence: Synthetic polypeptide"
DIQMTQSPSSLSASVGDRVTITCSASSSISYIYWFQQKPGKAPKRWIYATSELASGVPSRFSGSGSGTDFTLTISSLQPEDFATYYCQQRSSYPLTFGQGTKLEIK

SEQ ID NO: 416 - protein, 106 aa, Artificial Sequence
  source: /note="Description of Artificial Sequence: Synthetic polypeptide"
DIQMTQSPSSLSASVGDRVTITCSASSSISYIYWFQQKPGKSPKRLIYATFELASGVPSRFSGSGSGTDYTLTISSLQPEDFATYYCNQRSSYPYTFGQGTKLEIK

SEQ ID NO: 417 - protein, 106 aa, Artificial Sequence
  source: /note="Description of Artificial Sequence: Synthetic polypeptide"
DIQMTQSPSSLSASVGDRVTITCSASSSISYLYWFQQKPGKAPKRWIYATSELASGVPSRFSGSGSGTDYTLTISSLQPEDFATYYCQQRSSYPYTFGQGTKLEIK

SEQ ID NO: 418 - protein, 106 aa, Artificial Sequence
  source: /note="Description of Artificial Sequence: Synthetic polypeptide"
DIQMTQSPSSLSASVGDRVTITCSASSSIDYLYWFQQKPGKAPKRWIYATSQLASGVPSRFSGSGSGTDFTLTISSLQPEDFATYYCQQRSTYPYTFGQGTKLEIK

SEQ ID NO: 419 - protein, 106 aa, Artificial Sequence
  source: /note="Description of Artificial Sequence: Synthetic polypeptide"
DIQMTQSPSSLSASVGDRVTITCSASQSVSYIYWFQQKPGKAPKRLIYATFELASGVPSRFSGSGSGTDFTLTISSLQPEDFATYYCQQRSSYPYTFGQGTKLEIK

SEQ ID NO: 420 - protein, 106 aa, Artificial Sequence
  source: /note="Description of Artificial Sequence: Synthetic polypeptide"
DIQMTQSPSSLSASVGDRVTITCSASQSISYIYWFQQKPGKAPKRLIYATSELASGVPSRFSGSGSGTDYTLTISSLQPEDFATYYCQQRSSYPLTFGQGTKLEIK

SEQ ID NO: 421 - protein, 106 aa, Artificial Sequence
  source: /note="Description of Artificial Sequence: Synthetic polypeptide"
DIQMTQSPSSLSASVGDRVTITCSASSSIGYIYWFQQKPGKSPKRWIYATSELASGVPSRFSGSGSGTDFTLTISSLQPEDFATYYCQQRSSYPITFGQGTKLEIK

SEQ ID NO: 422 - protein, 106 aa, Artificial Sequence
  source: /note="Description of Artificial Sequence: Synthetic polypeptide"
DIQMTQSPSSLSASVGDRVTITCRASQIISYIYWFQQKPGKSPKRWIYATSELASGVPSRFSGSGSGTDYTLTISSLQPEDFATYYCLQRSSYPYTFGQGTKLEIK

SEQ ID NO: 423 - protein, 106 aa, Artificial Sequence
  source: /note="Description of Artificial Sequence: Synthetic polypeptide"
DIQMTQSPSSLSASVGDRVTITCSASSSISYLYWFQQKPGKSPKRLIYETSELQSGVPSRFSGSGSGTDFTLTISSLQPEDFATYYCQQRSSYPFTFGQGTKLEIK

SEQ ID NO: 424 - protein, 106 aa, Artificial Sequence
  source: /note="Description of Artificial Sequence: Synthetic polypeptide"
DIQMTQSPSSLSASVGDRVTITCSASQSIGYIYWFQQKPGKSPKRWIYATSELASGVPSRFSGSGSGTDYTLTISSLQPEDFATYYCQQRSSYPLTFGQGTKLEIK

SEQ ID NO: 425 - protein, 106 aa, Artificial Sequence
  source: /note="Description of Artificial Sequence: Synthetic polypeptide"
DIQMTQSPSSLSASVGDRVTITCRASQSISYIYWFQQKPGKSPKRLIYATSELASGVPSRFSGSGSGTDYTLTISSLQPEDFATYYCQQRSSYPPTFGQGTKLEIK

SEQ ID NO: 426 - protein, 106 aa, Artificial Sequence
  source: /note="Description of Artificial Sequence: Synthetic polypeptide"
DIQMTQSPSSLSASVGDRVTITCRASSSISYIYWFQQKPGKAPKRLIYATSDLASGVPSRFSGSGSGTDFTLTISSLQPEDFATYYCQQRSNYPITFGQGTKLEIK

SEQ ID NO: 427 - protein, 106 aa, Artificial Sequence
  source: /note="Description of Artificial Sequence: Synthetic polypeptide"
DIQMTQSPSSLSASVGDRVTITCSASSIISYLYWFQQKPGKAPKRLIYATSELASGVPSRFSGSGSGTDYTLTISSLQPEDFATYYCQQRSIYPLTFGQGTKLEIK

SEQ ID NO: 428 - protein, 106 aa, Artificial Sequence
  source: /note="Description of Artificial Sequence: Synthetic polypeptide"
DIQMTQSPSSLSASVGDRVTITCSASQSISYIYWFQQKPGKAPKRLIYATFELASGVPSRFSGSGSGTDFTLTISSLQPEDFATYYCQQRSIYPLTFGQGTKLEIK

SEQ ID NO: 429 - protein, 106 aa, Artificial Sequence
  source: /note="Description of Artificial Sequence: Synthetic polypeptide"
DIQMTQSPSSLSASVGDRVTITCSASSSISYLYWFQQKPGKAPKRLIYATSELASGVPSRFSGSGSGTDFTLTISSLQPEDFATYYCNQRSSYPYTFGQGTKLEIK

SEQ ID NO: 430 - protein, 106 aa, Artificial Sequence
  source: /note="Description of Artificial Sequence: Synthetic polypeptide"
DIQMTQSPSSLSASVGDRVTITCSASQSISYIYWFQQKPGKAPKRLIYSTFELQSGVPSRFSGSGSGTDYTLTISSLQPEDFATYYCNQRSSYPYTFGQGTKLEIK

SEQ ID NO: 431 - protein, 106 aa, Artificial Sequence
  source: /note="Description of Artificial Sequence: Synthetic polypeptide"
DIQMTQSPSSLSASVGDRVTITCSASSSISYIYWFQQKPGKAPKRLIYATSELASGVPSRFSGSGSGTDFTLTISSLQPEDFATYYCQQRSSYPYTFGQGTKLEIK

SEQ ID NO: 432 - protein, 106 aa, Artificial Sequence
  source: /note="Description of Artificial Sequence: Synthetic polypeptide"
DIQMTQSPSSLSASVGDRVTITCSASSSISYLYWFQQKPGKSPKRLIYATSELASGVPSRFSGSGSGTDFTLTISSLQPEDFATYYCNQRSIYPYTFGQGTKLEIK

SEQ ID NO: 433 - protein, 106 aa, Artificial Sequence
  source: /note="Description of Artificial Sequence: Synthetic polypeptide"
DIQMTQSPSSLSASVGDRVTITCSASSSINYIYWFQQKPGKSPKRLIYATSELASGVPSRFSGSGSGTDFTLTISSLQPEDFATYYCQQRSMYPFTFGQGTKLEIK

SEQ ID NO: 434 - protein, 106 aa, Artificial Sequence
  source: /note="Description of Artificial Sequence: Synthetic polypeptide"
DIQMTQSPSSLSASVGDRVTITCSASSSISYLYWFQQKPGKAPKRWIYATSELASGVPSRFSGSGSGTDHTLTISSLQPEDFATYYCQQRSSYPLTFGQGTKLEIK

SEQ ID NO: 435 - protein, 106 aa, Artificial Sequence
  source: /note="Description of Artificial Sequence: Synthetic polypeptide"
DIQMTQSPSSLSASVGDRVTITCRASQSINYLYWFQQKPGKAPKRWIYATSELASGVPSRFSGSGSGTDFTLTISSLQPEDFATYYCHQRTNYPPTFGQGTKLEIK

SEQ ID NO: 436 - protein, 107 aa, Artificial Sequence
  source: /note="Description of Artificial Sequence: Synthetic polypeptide"
DIQMTQSPSSLSASVGDRVTITCSASSGSIPYIYWFQQKPGKAPKRLIYGTSGLQSGVPSRFSGSGSGTDFTLTISSLQPEDFATYYCQQRTSYPITFGQGTKLEIK

SEQ ID NO: 437 - protein, 107 aa, Artificial Sequence
  source: /note="Description of Artificial Sequence: Synthetic polypeptide"
DIQMTQSPSSLSASVGDRVTITCRASSGIRRFINWFQQKPGKAPKRLIYATSELQSGVPSRFSGSGSGTDYTLTISSLQPEDFATYYCQQWSSYPWTFGQGTKLEIK

SEQ ID NO: 438 - protein, 107 aa, Artificial Sequence
  source: /note="Description of Artificial Sequence: Synthetic polypeptide"
DIQMTQSPSSLSASVGDRVTITCSASQGSISYIYWFQQKPGKSPKRLIYETFDLQSGVPSRFSGSGSGTDFTLTISSLQPEDFATYYCQQRAIYPITFGQGTKLEIK

SEQ ID NO: 439 - protein, 107 aa, Artificial Sequence
  source: /note="Description of Artificial Sequence: Synthetic polypeptide"
DIQMTQSPSSLSASVGDRVTITCSASQDSINYIYWFQQKPGKAPKRLIYSTSDLQSGVPSRFSGSGSGTDFTLTISSLQPEDFATYYCLQLSRYPPTFGQGTKLEIK

SEQ ID NO: 440 - protein, 107 aa, Artificial Sequence
  source: /note="Description of Artificial Sequence: Synthetic polypeptide"
DIQMTQSPSSLSASVGDRVTITCSASQGSISYIYWFQQKPGKSPKRLIYETFELQSGVPSRFSGSGSGTDFTLTISSLQPEDFATYYCYQKNIYPWTFGQGTKLEIK

SEQ ID NO: 441 - protein, 107 aa, Artificial Sequence
  source: /note="Description of Artificial Sequence: Synthetic polypeptide"
DIQMTQSPSSLSASVGDRVTITCSASQGSINYIYWFQQKPGKAPKRWIYGTSYLASGVPSRFSGSGSGTDFTLTISSLQPEDFATYYCQQRSSYPITFGQGTKLEIK

SEQ ID NO: 442 - protein, 106 aa, Artificial Sequence
  source: /note="Description of Artificial Sequence: Synthetic polypeptide"
DIQMTQSPSSLSASVGDRVTITCRASSSISYIYWFQQKPGKAPKRWIYATSELASGVPSRFSGSGSGTDFTLTISSLQPEDFATYYCNQRSRYPPTFGQGTKLEIK

SEQ ID NO: 443 - protein, 107 aa, Artificial Sequence
  source: /note="Description of Artificial Sequence: Synthetic polypeptide"
DIQMTQSPSSLSASVGDRVTITCRASSSIKSYLNWFQQKPGKAPKRLIYATFELQSGVPSRFSGSGSGTDYTLTISSLQPEDFATYYCQQWRNYPWTFGQGTKLEIK

SEQ ID NO: 444 - protein, 107 aa, Artificial Sequence
  source: /note="Description of Artificial Sequence: Synthetic polypeptide"
DIQMTQSPSSLSASVGDRVTITCRASSDSISYISWFQQKPGKAPKRWIYATSELQSGVPSRFSGSGSGTDFTLTISSLQPEDFATYYCQQPGIYPGTFGQGTKLEIK

SEQ ID NO: 445 - protein, 107 aa, Artificial Sequence
  source: /note="Description of Artificial Sequence: Synthetic polypeptide"
DIQMTQSPSSLSASVGDRVTITCSASQGIFSYLFWYQQKPGKAPKRLIYATSELASGVPSRFSGSGSGTDYTLTISSLQPEDFATYYCQQGSRYPDTFGQGTKLEIK

SEQ ID NO: 446 - protein, 107 aa, Artificial Sequence
  source: /note="Description of Artificial Sequence: Synthetic polypeptide"
DIQMTQSPSSLSASVGDRVTITCSASQGINNYLNWFQQKPGKSPKRWIYATSELQSGVPSRFSGSGSGTDYTLTISSLQPEDFATYYCQQWGSYPWTFGQGTKLEIK

SEQ ID NO: 447 - protein, 107 aa, Artificial Sequence
  source: /note="Description of Artificial Sequence: Synthetic polypeptide"
DIQMTQSPSSLSASVGDRVTITCSASSDIVSYIYWFQQKPGKSPKRLIYATSGLASGVPSRFSGSGSGTDFTLTISSLQPEDFATYYCQQRSSYPITFGQGTKLEIK

SEQ ID NO: 448 - protein, 106 aa, Artificial Sequence
  source: /note="Description of Artificial Sequence: Synthetic polypeptide"
DIQMTQSPSSLSASVGDRVTITCSASSSISYIYWFQQKPGKAPKRLIYATSELASGVPSRFSGSGSGTDYTLTISSLQPEDFATYYCHQRSYYPLTFGQGTKLEIK

SEQ ID NO: 449 - protein, 107 aa, Artificial Sequence
  source: /note="Description of Artificial Sequence: Synthetic polypeptide"
DIQMTQSPSSLSASVGDRVTITCRASSGSIGDLDWFQQKPGKAPKRLIYSTFWLASGVPSRFSGSGSGTDFTLTISSLQPEDFATYYCQQRSIYPPTFGQGTKLEIK

SEQ ID NO: 450 - protein, 107 aa, Artificial Sequence
  source: /note="Description of Artificial Sequence: Synthetic polypeptide"
DIQMTQSPSSLSASVGDRVTITCSASSGSISYIYWFQQKPGKAPKRWIYATSELASGVPSRFSGSGSGTDFTLTISSLQPEDFATYYCQQRSSYPLTFGQGTKLEIK

SEQ ID NO: 451 - protein, 107 aa, Artificial Sequence
  source: /note="Description of Artificial Sequence: Synthetic polypeptide"
DIQMTQSPSSLSASVGDRVTITCSASQGIISYIDWFQQKPGKAPKRLIYATFELASGVPSRFSGSGSGTDFTLTISSLQPEDFATYYCHQLGSYPDTFGQGTKLEIK

SEQ ID NO: 452 - protein, 107 aa, Artificial Sequence
  source: /note="Description of Artificial Sequence: Synthetic polypeptide"
DIQMTQSPSSLSASVGDRVTITCSASSGIISSIDWFQQKPGKAPKRLIYATSELQSGVPSRFSGSGSGTDYTLTISSLQPEDFATYYCQQWMSYPLTFGQGTKLEIK

SEQ ID NO: 453 - protein, 107 aa, Artificial Sequence
  source: /note="Description of Artificial Sequence: Synthetic polypeptide"
DIQMTQSPSSLSASVGDRVTITCSASSGSINYIYWFQQKPGKSPKRLIYSTSDLQSGVPSRFSGSGSGTDFTLTISSLQPEDFATYYCQQRSIYPITFGQGTKLEIK

SEQ ID NO: 454 - protein, 107 aa, Artificial Sequence; identical to SEQ ID NO: 119
  source: /note="Description of Artificial Sequence: Synthetic polypeptide"

SEQ ID NO: 455 - protein, 107 aa, Artificial Sequence
  source: /note="Description of Artificial Sequence: Synthetic polypeptide"
DIQMTQSPSSLSASVGDRVTITCSASSGSISYIYWFQQKPGKAPKRLIYDTFELASGVPSRFSGSGSGTDFTLTISSLQPEDFATYYCYQKKLYPWTFGQGTKLEIK

SEQ ID NO: 456 - protein, 107 aa, Artificial Sequence
  source: /note="Description of Artificial Sequence: Synthetic polypeptide"
DIQMTQSPSSLSASVGDRVTITCSASSGSISYIYWFQQKPGKAPKRWIYATSELASGVPSRFSGSGSGTDFTLTISSLQPEDFATYYCQQRSIYPLTFGQGTKLEIK

SEQ ID NO: 457 - protein, 107 aa, Artificial Sequence
  source: /note="Description of Artificial Sequence: Synthetic polypeptide"
DIQMTQSPSSLSASVGDRVTITCSASSDISSYLNWFQQKPGKSPKRLIYRTSELQSGVPSRFSGSGSGTDFTLTISSLQPEDFATYYCHQLGSYPDTFGQGTKLEIK

SEQ ID NO: 458 - protein, 107 aa, Artificial Sequence
  source: /note="Description of Artificial Sequence: Synthetic polypeptide"
DIQMTQSPSSLSASVGDRVTITCSASSDSVSYIYWFQQKPGKAPKRLIYATSELQSGVPSRFSGSGSGTDFTLTISSLQPEDFATYYCQQRSSYPITFGQGTKLEIK

SEQ ID NO: 459 - protein, 107 aa, Artificial Sequence
  source: /note="Description of Artificial Sequence: Synthetic polypeptide"
DIQMTQSPSSLSASVGDRVTITCSASQGSVSNIDWFQQKPGKAPKRLIYATFHLASGVPSRFSGSGSGTDFTLTISSLQPEDFATYYCLQRGSYPGTFGQGTKLEIK

SEQ ID NO: 460 - protein, 107 aa, Artificial Sequence
  source: /note="Description of Artificial Sequence: Synthetic polypeptide"
DIQMTQSPSSLSASVGDRVTITCSASSGIISYIGWFQQKPGKAPKRLIYATSELASGVPSRFSGSGSGTDFTLTISSLQPEDFATYYCHQPGIYPGTFGQGTKLEIK

SEQ ID NO: 461 - protein, 107 aa, Artificial Sequence
  source: /note="Description of Artificial Sequence: Synthetic polypeptide"
DIQMTQSPSSLSASVGDRVTITCSASQGIISYINWYQQKPGKAPKRLIYSTSELASGVPSRFSGSGSGTDYTLTISSLQPEDFATYYCQQQGSYPDTFGQGTKLEIK

SEQ ID NO: 462 - protein, 107 aa, Artificial Sequence
  source: /note="Description of Artificial Sequence: Synthetic polypeptide"
DIQMTQSPSSLSASVGDRVTITCSASSGSISYLYWFQQKPGKAPKRLIYRTSELQSGVPSRFSGSGSGTDFTLTISSLQPEDFATYYCQQWSSYPWTFGQGTKLEIK

SEQ ID NO: 463 - protein, 107 aa, Artificial Sequence
  source: /note="Description of Artificial Sequence: Synthetic polypeptide"
DIQMTQSPSSLSASVGDRVTITCSASSDISSYLNWFQQKPGKAPKRLIYPTFELQSGVPSRFSSSGSGTDFTLTISSLQPEDFATYYCLQFSIYPPTFGQGTKLEIK

SEQ ID NO: 464 - protein, 107 aa, Artificial Sequence
  source: /note="Description of Artificial Sequence: Synthetic polypeptide"
DIQMTQSPSSLSASVGDRVTITCSASQDSIRYIYWFQQKPGKAPKRLIYATSELASGVPSRFSGSGSGTDFTLTISSLQPEDFATYYCYQGTIYPPTFGQGTKLEIK

SEQ ID NO: 465 - protein, 107 aa, Artificial Sequence
  source: /note="Description of Artificial Sequence: Synthetic polypeptide"
DIQMTQSPSSLSASVGDRVTITCRASSGINGYIYWFQQKPGKAPKRLFYSTFELQSGVPSRFSGSGSGTDFTLTISSLQPEDFATYYCQQRSFYPLTFGQGTKLEIK

SEQ ID NO: 466 - protein, 107 aa, Artificial Sequence
  source: /note="Description of Artificial Sequence: Synthetic polypeptide"
DIQMTQSPSSLSASVGDRVTITCSASSGIISSIDWFQQKPGKAPKRLIYDTFELASGVPSRFSGSGSGTDFTLTISSLQPEDFATYYCSQMSSYPHTFGQGTKLEIK

SEQ ID NO: 467 - protein, 107 aa, Artificial Sequence
  source: /note="Description of Artificial Sequence: Synthetic polypeptide"
DIQMTQSPSSLSASVGDRVTITCSASSGSISYIYWFQQKPGKAPKRWIYATSELASGVPSRFSGSGSGTDFTLTISSLQPEDFATYYCQQRSSYPITFGQGTKLEIK

SEQ ID NO: 468 - protein, 107 aa, Artificial Sequence
  source: /note="Description of Artificial Sequence: Synthetic polypeptide"
DIQMTQSPSSLSASVGDRVTITCSASSSSISYIYWFQQKPGKAPKRLIYATSELASGVPSRFSGSGSGTDFTLTISSLQPEDFATYYCQQRSRYPYTFGQGTKLEIK

SEQ ID NO: 469 - protein, 107 aa, Artificial Sequence
  source: /note="Description of Artificial Sequence: Synthetic polypeptide"
DIQMTQSPSSLSASVGDRVTITCSASSSIISNLYWFQQKPGKAPKRWIYQTFELASGVPSRFSGSESGTDFTLTISSLQPEDFATYYCYQGSTYPPTFGQGTKLEIK

SEQ ID NO: 470 - protein, 107 aa, Artificial Sequence
  source: /note="Description of Artificial Sequence: Synthetic polypeptide"
DIQMTQSPSSLSASVGDRVTITCSASSGSISYIYWFQQKPGKSPKRLIYATSELASGVPSRFSGSGSGTDFTLTISSLQPEDFATYYCQQRSIYPITFGQGTKLEIK

SEQ ID NO: 471 - protein, 107 aa, Artificial Sequence
  source: /note="Description of Artificial Sequence: Synthetic polypeptide"
DIQMTQSPSSLSASVGDRVTITCSASSDISSYLNWFQQKPGKSPKRLIYRTSELQSGVPSRFSGSGSGTDFTLTISSLQPEDFATYYCHQFSSYPQTFGQGTKLEIK

SEQ ID NO: 472 - protein, 107 aa, Artificial Sequence
  source: /note="Description of Artificial Sequence: Synthetic polypeptide"
DIQMTQSPSSLSASVGDRVTITCSASSGSISYIYWFQQKPGKAPKRWIYATSELASGVPSRFSGSGSGTDFTLTISSLQPEDFATYYCHQRSSYPYTFGQGTKLEIK

SEQ ID NO: 473 - protein, 107 aa, Artificial Sequence
  source: /note="Description of Artificial Sequence: Synthetic polypeptide"
DIQMTQSPSSLSASVGDRVTITCSASSSSINYIYWFQQKPGKAPKRWIYATSELASGVPSRFSGSGSGTDYTLTISSLQPEDFATYYCQQRSIYPLTFGQGTKLEIK

SEQ ID NO: 474 - protein, 107 aa, Artificial Sequence
  source: /note="Description of Artificial Sequence: Synthetic polypeptide"
DIQMTQSPSSLSASVGDRVTITCRASSGIVSYLYWFQQKPGKAPKRWIYATSELASGVPSRFSGSGSGTDYTLTISSLQPEDFATYYCQQRSSYPITFGQGTKLEIK

SEQ ID NO: 475 - protein, 107 aa, Artificial Sequence
  source: /note="Description of Artificial Sequence: Synthetic polypeptide"
DIQMTQSPSSLSASVGDRVTITCSASSDSISYIYWFQQKPGKAPKRLIYDTFELQSGVPSRFSGSGSGTDFTLTISSLQPEDFATYYCQQRSRYPITFGQGTKLEIK

SEQ ID NO: 476 - protein, 107 aa, Artificial Sequence
  source: /note="Description of Artificial Sequence: Synthetic polypeptide"
DIQMTQSPSSLSASVGDRVTITCSASQTSLSAIYWFQQKPGKAPKRLIYMTSELASGVPSRFSGSGSGTDYTLTISSLQPEDFATYYCYQSSRYPPTFGQGTKLEIK

SEQ ID NO: 477 - protein, 107 aa, Artificial Sequence
  source: /note="Description of Artificial Sequence: Synthetic polypeptide"
DIQMTQSPSSLSASVGDRVTITCRASSGIISYLQWFQQKPGKAPKRWIYATSELASGVPSRFSGSGSGTDFTLTISSLQPEDFATYYCLQVSSYPPTFGQGTKLEIK

SEQ ID NO: 478 - protein, 107 aa, Artificial Sequence; identical to SEQ ID NO: 118
  source: /note="Description of Artificial Sequence: Synthetic polypeptide"

SEQ ID NO: 479 - protein, 107 aa, Artificial Sequence
  source: /note="Description of Artificial Sequence: Synthetic polypeptide"
DIQMTQSPSSLSASVGDRVTITCRASSGSINYIYWFQQKPGKAPKRWIYATSELASGVPSRFSGSGSGTDYTLTISSLQPEDFATYYCQQRSSYPYTFGQGTKLEIK

SEQ ID NO: 480 - protein, 107 aa, Artificial Sequence
  source: /note="Description of Artificial Sequence: Synthetic polypeptide"
DIQMTQSPSSLSASVGDRVTITCRASQDSISYIYWFQQKPGKAPKRWIYATSELASGVPSRFSGSGSGTDFTLTISSLQPEDFATYYCQQRSSYPITFGQGTKLEIK

SEQ ID NO: 481 - protein, 107 aa, Artificial Sequence
  source: /note="Description of Artificial Sequence: Synthetic polypeptide"
DIQMTQSPSSLSASVGDRVTITCSASSDSISYIYWFQQKPGKAPKRWIYATSELASGVPSRFSGSGSGTDFTLTISSLQPEDFATYYCQQRSFYPLTFGQGTKLEIK

SEQ ID NO: 482 - protein, 107 aa, Artificial Sequence
  source: /note="Description of Artificial Sequence: Synthetic polypeptide"
DIQMTQSPSSLSASVGDRVTITCRASQGIISYIYWFQQKPGKAPKRLIYDTSELASGVPSRFSGSGSGTDFTLTISSLQPEDFATYYCYQKSIYPWTFGQGTKLEIK

SEQ ID NO: 483 - protein, 107 aa, Artificial Sequence
  source: /note="Description of Artificial Sequence: Synthetic polypeptide"
DIQMTQSPSSLSASVGDRVTITCSASSEIVSYIYWFQQKPGKAPKRLIYATSELASGVPSRFSGSGSGTDYTLTISSLQPEDFATYYCQQRSSYPPTFGQGTKLEIK

SEQ ID NO: 484 - protein, 107 aa, Artificial Sequence
  source: /note="Description of Artificial Sequence: Synthetic polypeptide"
DIQMTQSPSSLSASVGDRVTITCSASQGSLRYIYWFQQKPGKAPKRWIYATSELASGVPSRFSGSGSGTDFTLTISSLQPEDFATYYCQQRSSYPLTFGQGTKLEIK

SEQ ID NO: 485 - protein, 107 aa, Artificial Sequence
  source: /note="Description of Artificial Sequence: Synthetic polypeptide"
DIQMTQSPSSLSASVGDRVTITCRASSGSIRDLYWFQQKPGKAPKRLIYDTFELASGVPSRFSGSGSGTDYTLTISSLQPEDFATYYCYQKSTYPWTFGQGTKLEIK

SEQ ID NO: 486 - protein, 107 aa, Artificial Sequence
  source: /note="Description of Artificial Sequence: Synthetic polypeptide"
DIQMTQSPSSLSASVGDRVTITCSASSGSINYLYWFQQKPGKAPKRLIYDTFYLASGVPSRFSGSGSGTDFTLTISSLQPEDFATYYCYQKSTYPWTFGQGTKLEIK

SEQ ID NO: 487 - protein, 107 aa, Artificial Sequence
  source: /note="Description of Artificial Sequence: Synthetic polypeptide"
DIQMTQSPSSLSASVGDRVTITCRASQSSIRYLYWYQQKPGKAPKRLIYATSELASGVPSRFSGSGSGTDYTLTISSLQPEDFATYYCQQRDIYPPTFGQGTKLEIK

SEQ ID NO: 488 - protein, 107 aa, Artificial Sequence
  source: /note="Description of Artificial Sequence: Synthetic polypeptide"
DIQMTQSPSSLSASVGDRVTITCSASQGIGSYIYWFQQKPGKAPKRWIYATSELASGVPSRFSGSGSGTDFTLTISSLQPEDFATYYCHQRSSYPYTFGQGTKLEIK

SEQ ID NO: 489 - protein, 107 aa, Artificial Sequence
  source: /note="Description of Artificial Sequence: Synthetic polypeptide"
DIQMTQSPSSLSASVGDRVTITCRASSGSIRDLYWFQQKPGKAPKRWIYQTSELASGVPSRFSGSGSGTDFTLTISSLQPEDFATYYCQQVSSYPPTFGQGTKLEIK

SEQ ID NO: 490 - protein, 107 aa, Artificial Sequence
  source: /note="Description of Artificial Sequence: Synthetic polypeptide"
DIQMTQSPSSLSASVGDRVTITCSASQASISYIYWFQQKPGKAPKRLIYDTFELQSGVPSRFSGSGSGTDFTLTISSLQPEDFATYYCQQRSSYPITFGQGTKLEIK

SEQ ID NO: 491 - protein, 107 aa, Artificial Sequence
  source: /note="Description of Artificial Sequence: Synthetic polypeptide"
DIQMTQSPSSLSASVGDTVTITCRASQVSISYIYWFQQKPGKAPKRWIYATSELASGVPSRFSGSGSGTDFTLTISSLQPEDFATYYCQQRSSYPYTFGQGTKLEIK

SEQ ID NO: 492 - protein, 107 aa, Artificial Sequence
  source: /note="Description of Artificial Sequence: Synthetic polypeptide"
DIQMTQSPSSLSASVGDRVTITCSASSDISSYLNWFQQKPGKSPKRLIYRTSELQSGVPSRFSGSGSGTDFTLTISSLQPEDFATYYCQQRSFYPLTFGQGTKLEIK

SEQ ID NO: 493 - protein, 107 aa, Artificial Sequence
  source: /note="Description of Artificial Sequence: Synthetic polypeptide"
DIQMTQSPSSLSASVGDRVTITCRASSDIFSCIFWFQQKPGKAPKRLIYETFDLASGVPSRFSGSGSGTDYTLTISSLQPEDFATYYCLQWSSYPPTFGQGTKLEIK

SEQ ID NO: 494 - protein, 107 aa, Artificial Sequence
  source: /note="Description of Artificial Sequence: Synthetic polypeptide"
DIQMTQSPSSLSASVGDRVTITCSASSGIGSYIYWFQQKPGKAPKRWIYATSELASGVPSRFSGSGSGTDFTLTISSLQPEDFATYYCHQRSSYPYTFGQGTKLEIK

SEQ ID NO: 495 - protein, 107 aa, Artificial Sequence
  source: /note="Description of Artificial Sequence: Synthetic polypeptide"
DIQMTQSPSSLSASVGDRVTITCSASQGIKGYLNWFQQKPGKAPKRLIYATFELQSGVPSRFSGSGSGTDYTLTISSLQPEDFATYYCQQWSKYPWTFGQGTKLEIK

SEQ ID NO: 496 - protein, 107 aa, Artificial Sequence
  source: /note="Description of Artificial Sequence: Synthetic polypeptide"
DIQMTQSPSSLSASVGDRVTITCSASSGSISYIDWFQQKPGKAPKRLIYATFELASGVPSRFSGSGSGTDFTLTISSLQPEDFATYYCHQFSSYPQTFGQGTKLEIK

SEQ ID NO: 497 - protein, 107 aa, Artificial Sequence
  source: /note="Description of Artificial Sequence: Synthetic polypeptide"
DIQMTQSPSSLSASVGDRVTITCSASQGIGSYIYWFQQKPGKAPKRWIYATSELASGVPSRFSGSGSGTDFTLTISSLQPEDFATYYCYQDSRYPPTFGQGTKLEIK

SEQ ID NO: 498 - protein, 107 aa, Artificial Sequence
  source: /note="Description of Artificial Sequence: Synthetic polypeptide"
DIQMTQSPSSLSASVGDRVTITCRASQDSIRYIYWFQQKPGKAPKRLIYATFELASGVPSRFSGSGSGTDYTLTISSLQPEDFATYYCNQRSNYPYTFGQGTKLEIK

SEQ ID NO: 499 - protein, 107 aa, Artificial Sequence
  source: /note="Description of Artificial Sequence: Synthetic polypeptide"
DIQMTQSPSSLSASVGDRVTITCSASSGSLSYIYWFQQKPGKAPKRWIYATSELASGVPSRFSGSGSGTDYTLTISSLQPEDFATYYCQQRSIYPYTFGQGTKLEIK

SEQ ID NO: 500 - protein, 107 aa, Artificial Sequence
  source: /note="Description of Artificial Sequence: Synthetic polypeptide"
DIQMTQSPSSLSASVGDRVTITCSASSGSISYIDWFQQKPGKSPKRLIYATFELASGVPSRFSGSGSGTDYTLTISSLQPEDFATYYCHQIGSYPGTFGQGTKLEIK

SEQ ID NO: 501 - protein, 107 aa, Artificial Sequence
  source: /note="Description of Artificial Sequence: Synthetic polypeptide"
DIQMTQSPSSLSASVGDRVTITCRASSGIISYVDWFQQKPGKAPKRLIYATFELASGVPSRFSGSGSGTDFTLTISSLQPEDFATYYCHQIGIYPRTFGQGTKLEIK

SEQ ID NO: 502 - protein, 107 aa, Artificial Sequence
  source: /note="Description of Artificial Sequence: Synthetic polypeptide"
DIQMTQSPSSLSASVGDRVTITCKASSGIIGYIDWFQQKPGKAPKRLIYATFDLASGVPSRFSGSGSGTDYTLTISSLQPEDFATYYCRQVGSYPETFGQGTKLEIK

SEQ ID NO: 503 - protein, 107 aa, Artificial Sequence
  source: /note="Description of Artificial Sequence: Synthetic polypeptide"
DIQMTQSPSSLSASVGDRVTITCRASSGINRYIDWFQQKPGKAPKRLIYATFDLASGVPSRFSGSGSGTDYTLTISSLQPEDFATYYCRQVGSYPETFGQGTKLEIK

SEQ ID NO: 504 - protein, 107 aa, Artificial Sequence
  source: /note="Description of Artificial Sequence: Synthetic polypeptide"
DIQMTQSPSSLSASVGDRVTITCSASQGIGSYIYWFQQKPGKAPKRWIYATSELASGVPSRFSGSGSGTDFTLTISSLQPEDFATYYCQQRSSYPITFGQGTKLEIK

SEQ ID NO: 505 - protein, 107 aa, Artificial Sequence; identical to SEQ ID NO: 120
  source: /note="Description of Artificial Sequence: Synthetic polypeptide"

SEQ ID NO: 506 - protein, 107 aa, Artificial Sequence
  source: /note="Description of Artificial Sequence: Synthetic polypeptide"
DIQMTQSPSSLSASVGDRVTITCSASSASVRYIDWFQQKPGKAPKRLIYATFDLASGVPSRFSGSGSGTDYTLTISSLQPEDFATYYCRQVGSYPETFGQGTKLEIK

SEQ ID NO: 507 - protein, 107 aa, Artificial Sequence
  source: /note="Description of Artificial Sequence: Synthetic polypeptide"
DIQMTQSPSSLSASVGDRVTITCRASSGIRSYIDWFQQKPGKSPKRLIYATFDLASGVPSRFSGSGSGTDYTLTISSLQPEDFATYYCRQVGNYPGTFGQGTKLEIK

SEQ ID NO: 508 - protein, 107 aa, Artificial Sequence
  source: /note="Description of Artificial Sequence: Synthetic polypeptide"
DIQMTQSPSSLSASVGDRVTITCSASQGSNCYLDWFQQKPGKAPKRLIYATSELASGVPSRFSSSGSGTDYTLTISSLQPEDFATYYCHQLSSYPNTFGQGTKLEIK

SEQ ID NO: 509 - protein, 107 aa, Artificial Sequence
  source: /note="Description of Artificial Sequence: Synthetic polypeptide"
DIQMTQSPSSLSASVGDRVTITCSASSDINSYIDWFQQKPGKAPKRLIYATFELASGVPSRFSGSGSGTDYTLTISSLQPEDFATYYCHQLGSYPRTFGQGTKLEIK

SEQ ID NO: 510 - protein, 107 aa, Artificial Sequence
  source: /note="Description of Artificial Sequence: Synthetic polypeptide"
DIQMTQSPSSLSASVGDRVTITCSASQGSISYIDWFQQKPGKAPKRLIYATFDLASGVPSRFSGSGSGTDYTLTISSLQPEDFATYYCRQVGSYPETFGQGTKLEIK

SEQ ID NO: 511 - protein, 107 aa, Artificial Sequence; identical to SEQ ID NO: 117
  source: /note="Description of Artificial Sequence: Synthetic polypeptide"

SEQ ID NO: 512 - protein, 107 aa, Artificial Sequence
  source: /note="Description of Artificial Sequence: Synthetic polypeptide"
DIQMTQSPSSLSASVGDRVTITCSASSGSISYIDWFQQKPGKAPKRLIYATFELASGVPSRFSGSGSGTDYTLTISSLQPEDFATYYCRQVGSYPETFGQGTKLEIK

SEQ ID NO: 513 - protein, 107 aa, Artificial Sequence
  source: /note="Description of Artificial Sequence: Synthetic polypeptide"
DIQMTQSPSSLSASVGDRVTITCSASQGIFSYIDWFQQKPGKAPKRLIYATFDLASGVPSRFSGSGSGTDYTLTISSLQPEDFATYYCRQVGSYPETFGQGTKLEIK

SEQ ID NO: 514 - protein, 107 aa, Artificial Sequence
  source: /note="Description of Artificial Sequence: Synthetic polypeptide"
DIQMTQSPSSLSASVGDRVTITCSASSGSISYIDWFQQKPGKAPKRLIYATFDLASGVPSRFSSSGSGTDYTLTISSLQPEDFATYYCHQLGSYPGTFGQGTKLEIK

SEQ ID NO: 515 - protein, 107 aa, Artificial Sequence; identical to SEQ ID NO: 117
  source: /note="Description of Artificial Sequence: Synthetic polypeptide"

SEQ ID NO: 516 - protein, 107 aa, Artificial Sequence
  source: /note="Description of Artificial Sequence: Synthetic polypeptide"
DIQMTQSPSSLSASVGDRVTITCRASSGIPSYIDWFQQKPGKAPKRLIYATFELASGVPSRFSGSGSGTDYTLTISSLQPEDFATYYCRQLGSYPRTFGQGTKLEIK

SEQ ID NO: 517 - protein, 107 aa, Artificial Sequence
  source: /note="Description of Artificial Sequence: Synthetic polypeptide"
DIQMTQSPSSLSASVGDRVTITCRASSGIISYIDWFQQKPGKAPKRLIYATFDLASGVPSRFSGSGSGTDYTLTISSLQPEDFATYYCRQVGSYPETFGHGTKLEIK

SEQ ID NO: 518 - protein, 107 aa, Artificial Sequence; identical to SEQ ID NO: 117
  source: /note="Description of Artificial Sequence: Synthetic polypeptide"

SEQ ID NO: 519 - protein, 107 aa, Artificial Sequence
  source: /note="Description of Artificial Sequence: Synthetic polypeptide"
DIQMTQSPSSLSASVGDRVTITCSASQGIISYIDWFQQKPGKAPKRLIYATFELASGVPSRFSGSGSGTDFTLTISSLQPEDFATYYCRQVGSYPETFGQGTKLEIK

SEQ ID NO: 520 - protein, 107 aa, Artificial Sequence
  source: /note="Description of Artificial Sequence: Synthetic polypeptide"
DIQMTQSPSSLSVSVGDRVTITCRASSGIISYIDWFQQKPGKAPKRLIYATFDLASGVPSRFSGSGSGTDYTLTISSLQPEDFATYYCRQVGSYPETFGQGTKLEIK

SEQ ID NO: 521 - protein, 107 aa, Artificial Sequence
  source: /note="Description of Artificial Sequence: Synthetic polypeptide"
DIQMTQSPSSLSASVGDRVTITCRASSGIISYIDWFQQKPGKAPKRLIYATFDLASGVPSRFSGSGSGTDYTLTISSLQPEDFATYYCRQVGSYPETFGQGAKLEIK

SEQ ID NO: 522 - protein, 107 aa, Artificial Sequence; identical to SEQ ID NO: 117
  source: /note="Description of Artificial Sequence: Synthetic polypeptide"

SEQ ID NO: 523 - protein, 107 aa, Artificial Sequence; identical to SEQ ID NO: 116
  source: /note="Description of Artificial Sequence: Synthetic polypeptide"

SEQ ID NO: 524 - protein, 107 aa, Artificial Sequence
  source: /note="Description of Artificial Sequence: Synthetic polypeptide"
DIQMTQSPSSLSASVGDRVTITCSASSGSISYIDWFQQKPGKAPKRLIYATFDLASGVPSRFSGSGSGTDYTLTISSLQPEDFATYYCRQVGSYPETFGQGTKLEIK

SEQ ID NO: 525 - protein, 107 aa, Artificial Sequence
  source: /note="Description of Artificial Sequence: Synthetic polypeptide"
DIQMTQSPSSLSASVGDRVTITCRASSGIISYIDWFQQKPGKAPKRLIYATFDLASGVPSRFSGSGSGTDYTLTISSLQPEDFATYYCRQVGSYPDTFGQGTKLEIK

SEQ ID NO: 526 - protein, 107 aa, Artificial Sequence
  source: /note="Description of Artificial Sequence: Synthetic polypeptide"
DIQMTQSPSSLSTSVGDRVTITCRASSGIISYIDWFQQKPGKAPKRLIYATFDLASGVPSRFSGSGSGTDYTLTISSLQPEDFATYYCRQVGSYPETFGQGTKLEIK

SEQ ID NO: 527 - protein, 121 aa, Artificial Sequence; identical to SEQ ID NO: 108
  source: /note="Description of Artificial Sequence: Synthetic polypeptide"

SEQ ID NO: 528 - protein, 121 aa, Artificial Sequence; identical to SEQ ID NO: 109
  source: /note="Description of Artificial Sequence: Synthetic polypeptide"

SEQ ID NO: 529 - protein, 121 aa, Artificial Sequence; identical to SEQ ID NO: 30
  source: /note="Description of Artificial Sequence: Synthetic polypeptide"

SEQ ID NO: 530 - protein, 121 aa, Artificial Sequence; identical to SEQ ID NO: 111
  source: /note="Description of Artificial Sequence: Synthetic polypeptide"

SEQ ID NO: 531 - protein, 121 aa, Artificial Sequence; identical to SEQ ID NO: 112
  source: /note="Description of Artificial Sequence: Synthetic polypeptide"

SEQ ID NO: 532 - protein, 121 aa, Artificial Sequence; identical to SEQ ID NO: 113
  source: /note="Description of Artificial Sequence: Synthetic polypeptide"

SEQ ID NO: 533 - protein, 121 aa, Artificial Sequence; identical to SEQ ID NO: 114
  source: /note="Description of Artificial Sequence: Synthetic polypeptide"

SEQ ID NO: 534 - protein, 121 aa, Artificial Sequence; identical to SEQ ID NO: 115
  source: /note="Description of Artificial Sequence: Synthetic polypeptide"

SEQ ID NO: 535 - protein, 107 aa, Artificial Sequence; identical to SEQ ID NO: 116
  source: /note="Description of Artificial Sequence: Synthetic polypeptide"

SEQ ID NO: 536 - protein, 107 aa, Artificial Sequence; identical to SEQ ID NO: 117
  source: /note="Description of Artificial Sequence: Synthetic polypeptide"

SEQ ID NO: 537 - protein, 107 aa, Artificial Sequence; identical to SEQ ID NO: 118
  source: /note="Description of Artificial Sequence: Synthetic polypeptide"

SEQ ID NO: 538 - protein, 107 aa, Artificial Sequence; identical to SEQ ID NO: 119
  source: /note="Description of Artificial Sequence: Synthetic polypeptide"

SEQ ID NO: 539 - protein, 107 aa, Artificial Sequence; identical to SEQ ID NO: 120
  source: /note="Description of Artificial Sequence: Synthetic polypeptide"

SEQ ID NO: 540 - protein, 248 aa, Artificial Sequence
  source: /note="Description of Artificial Sequence: Synthetic polypeptide"
EVQLVESGGGLVQPGGSLRLSCAASGFTFSNYGVTWVRQAPGKGLEWVSMIWADGSTHYASSVKGRFTISRDNSKNTLYLQMNSLRAEDTAVYYCAREWQHGPVAYWGQGTLVTVSSGGGGSGGGGSEVQLVQSGAEVKKPGSSVKVSCKASGYTFTDYEIHWVRQAPGQGLEWMGVNDPESGGTFYNQKFDGRVTLTADESTSTAYMELSSLRSEDTAVYYCTRYSKWDSFDGMDYWGQGTTVTVSS

SEQ ID NO: 541 - protein, 117 aa, Artificial Sequence; identical to SEQ ID NO: 58
  source: /note="Description of Artificial Sequence: Synthetic polypeptide"

SEQ ID NO: 542 - protein, 10 aa, Artificial Sequence
  source: /note="Description of Artificial Sequence: Synthetic peptide"
GGGGSGGGGS

SEQ ID NO: 543 - protein, 121 aa, Artificial Sequence; identical to SEQ ID NO: 30
  source: /note="Description of Artificial Sequence: Synthetic polypeptide"

SEQ ID NO: 544 - protein, 330 aa, Artificial Sequence
  source: /note="Description of Artificial Sequence: Synthetic polypeptide"
ASTKGPSVFPLAPSSKSTSGGTAALGCLVKDYFPEPVTVSWNSGALTSGVHTFPAVLQSSGLYSLSSVVTVPSSSLGTQTYICNVNHKPSNTKVDKKVEPKSCDKTHTCPPCPAPEAAGGPSVFLFPPKPKDTLMISRTPEVTCVVVDVSHEDPEVKFNWYVDGVEVHNAKTKPREEQYNSTYRVVSVLTVLHQDWLNGKEYKCKVSNKALPAPIEKTISKAKGQPREPQVYTLPPSREEMTKNQVSLTCLVKGFYPSDIAVEWESNGQPENNYKTTPPVLDSDGSFFLYSKLTVDKSRWQQGNVFSCSVMHEALHNHYTQKSLSLSPGK

SEQ ID NO: 545 - protein, 225 aa, Artificial Sequence
  source: /note="Description of Artificial Sequence: Synthetic polypeptide"
DIQMTQSPSSLSASVGDRVTITCRASQLVSSAVAWYQQKPGKAPKLLIYWASARHTGVPSRFSGSGSGTDFTLTISSLQPEDFATYYCQQHYKTPFTFGQGTKLEIKRGGSGGGGSGDIQMTQSPSSLSASVGDRVTITCRASSGIISYIDWFQQKPGKAPKRLIYATFDLASGVPSRFSGSGSGTDYTLTISSLQPEDFATYYCRQVGSYPETFGQGTKLEIKR

SEQ ID NO: 546 - protein, 108 aa, Artificial Sequence; identical to SEQ ID NO: 78
  source: /note="Description of Artificial Sequence: Synthetic polypeptide"

SEQ ID NO: 547 - protein, 9 aa, Artificial Sequence
  source: /note="Description of Artificial Sequence: Synthetic peptide"
GGSGGGGSG

SEQ ID NO: 548 - protein, 108 aa, Artificial Sequence; identical to SEQ ID NO: 31
  source: /note="Description of Artificial Sequence: Synthetic polypeptide"

SEQ ID NO: 549 - protein, 106 aa, Artificial Sequence
  source: /note="Description of Artificial Sequence: Synthetic polypeptide"
TVAAPSVFIFPPSDEQLKSGTASVVCLLNNFYPREAKVQWKVDNALQSGNSQESVTEQDSKDSTYSLSSTLTLSKADYEKHKVYACEVTHQGLSSPVTKSFNRGEC

SEQ ID NO: 550 - protein, 248 aa, Artificial Sequence
  source: /note="Description of Artificial Sequence: Synthetic polypeptide"
EVQLVESGGGLVQPGGSLRLSCAASGFTFSNYGVEWVRQAPGKGLEWVSGIWADGSTHYADTVKSRFTISRDNSKNTLYLQMNSLRAEDTAVYYCAREWQHGPVAYWGQGTLVTVSSGGGGSGGGGSEVQLVQSGAEVKKPGSSVKVSCKASGYTFTDYEIHWVRQAPGQGLEWMGVNDPESGGTFYNQKFDGRVTLTADESTSTAYMELSSLRSEDTAVYYCTRYSKWDSFDGMDYWGQGTTVTVSS

SEQ ID NO: 551 - protein, 117 aa, Artificial Sequence; identical to SEQ ID NO: 59
  source: /note="Description of Artificial Sequence: Synthetic polypeptide"

SEQ ID NO: 552 - protein, 10 aa, Artificial Sequence
  source: /note="Description of Artificial Sequence: Synthetic peptide"
GGGGSGGGGS

SEQ ID NO: 553 - protein, 121 aa, Artificial Sequence; identical to SEQ ID NO: 30
  source: /note="Description of Artificial Sequence: Synthetic polypeptide"

SEQ ID NO: 554 - protein, 330 aa, Artificial Sequence; identical to SEQ ID NO: 544
  source: /note="Description of Artificial Sequence: Synthetic polypeptide"

SEQ ID NO: 555 - protein, 225 aa, Artificial Sequence
  source: /note="Description of Artificial Sequence: Synthetic polypeptide"
DIQMTQSPSSLSASVGDRVTITCKASQLVSSAVAWYQQKPGKAPKLLIYWASTLHTGVPSRFSGSGSGTDFTLTISSLQPEDFATYYCQQHYRTPFTFGQGTKLEIKRGGSGGGGSGDIQMTQSPSSLSASVGDRVTITCRASSGIISYIDWFQQKPGKAPKRLIYATFDLASGVPSRFSGSGSGTDYTLTISSLQPEDFATYYCRQVGSYPETFGQGTKLEIKR

SEQ ID NO: 556 - protein, 108 aa, Artificial Sequence; identical to SEQ ID NO: 84
  source: /note="Description of Artificial Sequence: Synthetic polypeptide"

SEQ ID NO: 557 - protein, 9 aa, Artificial Sequence
  source: /note="Description of Artificial Sequence: Synthetic peptide"
GGSGGGGSG

SEQ ID NO: 558 - protein, 108 aa, Artificial Sequence; identical to SEQ ID NO: 31
  source: /note="Description of Artificial Sequence: Synthetic polypeptide"

SEQ ID NO: 559 - protein, 106 aa, Artificial Sequence; identical to SEQ ID NO: 549
  source: /note="Description of Artificial Sequence: Synthetic polypeptide"

SEQ ID NO: 560 - protein, 248 aa, Artificial Sequence
  source: /note="Description of Artificial Sequence: Synthetic polypeptide"
EVQLVESGGGLVQPGGSLRLSCAASGFTFSNYGVTWVRQAPGKGLEWVSMIWADGSTHYASSVKGRFTISRDNSKNTLYLQMNSLRAEDTAVYYCAREWQHGPVAYWGQGTLVTVSSGGGGSGGGGSEVQLVQSGAEVKKPGSSVKVSCKASGYTFDDYEIHWVRQAPGQGLEWIGVNDPESGGTFYNQKFDGRATLTADKSTSTAYMELSSLRSEDTAVYYCTRYDKWDSFYGMDYWGQGTTVTVSS

SEQ ID NO: 561 - protein, 117 aa, Artificial Sequence; identical to SEQ ID NO: 58
  source: /note="Description of Artificial Sequence: Synthetic polypeptide"

SEQ ID NO: 562 - protein, 10 aa, Artificial Sequence
  source: /note="Description of Artificial Sequence: Synthetic peptide"
GGGGSGGGGS

SEQ ID NO: 563 - protein, 121 aa, Artificial Sequence; identical to SEQ ID NO: 109
  source: /note="Description of Artificial Sequence: Synthetic polypeptide"

SEQ ID NO: 564 - protein, 330 aa, Artificial Sequence; identical to SEQ ID NO: 544
  source: /note="Description of Artificial Sequence: Synthetic polypeptide"

SEQ ID NO: 565 - protein, 225 aa, Artificial Sequence
  source: /note="Description of Artificial Sequence: Synthetic polypeptide"
DIQMTQSPSSLSASVGDRVTITCRASQLVSSAVAWYQQKPGKAPKLLIYWASARHTGVPSRFSGSGSGTDFTLTISSLQPEDFATYYCQQHYKTPFTFGQGTKLEIKRGGSGGGGSGDIQMTQSPSSLSASVGDRVTITCSASSGSISYIDWFQQKPGKAPKRLIYATFELASGVPSRFSGSGSGTDFTLTISSLQPEDFATYYCHQLGSYPDTFGQGTKLEIKR

SEQ ID NO: 566 - protein, 108 aa, Artificial Sequence; identical to SEQ ID NO: 78
  source: /note="Description of Artificial Sequence: Synthetic polypeptide"

SEQ ID NO: 567 - protein, 9 aa, Artificial Sequence
  source: /note="Description of Artificial Sequence: Synthetic peptide"
GGSGGGGSG

SEQ ID NO: 568 - protein, 108 aa, Artificial Sequence
  source: /note="Description of Artificial Sequence: Synthetic polypeptide"
DIQMTQSPSSLSASVGDRVTITCSASSGSISYIDWFQQKPGKAPKRLIYATFELASGVPSRFSGSGSGTDFTLTISSLQPEDFATYYCHQLGSYPDTFGQGTKLEIKR

SEQ ID NO: 569 - protein, 106 aa, Artificial Sequence; identical to SEQ ID NO: 549
  source: /note="Description of Artificial Sequence: Synthetic polypeptide"

SEQ ID NO: 570 - protein, 248 aa, Artificial Sequence
  source: /note="Description of Artificial Sequence: Synthetic polypeptide"
EVQLVESGGGLVQPGGSLRLSCAASGFTFSNYGVEWVRQAPGKGLEWVSGIWADGSTHYADTVKSRFTISRDNSKNTLYLQMNSLRAEDTAVYYCAREWQHGPVAYWGQGTLVTVSSGGGGSGGGGSEVQLVQSGAEVKKPGSSVKVSCKASGYTFDDYEIHWVRQAPGQGLEWIGVNDPESGGTFYNQKFDGRATLTADKSTSTAYMELSSLRSEDTAVYYCTRYDKWDSFYGMDYWGQGTTVTVSS

SEQ ID NO: 571 - protein, 117 aa, Artificial Sequence; identical to SEQ ID NO: 59
  source: /note="Description of Artificial Sequence: Synthetic polypeptide"

SEQ ID NO: 572 - protein, 10 aa, Artificial Sequence
  source: /note="Description of Artificial Sequence: Synthetic peptide"
GGGGSGGGGS

SEQ ID NO: 573 - protein, 121 aa, Artificial Sequence; identical to SEQ ID NO: 109
  source: /note="Description of Artificial Sequence: Synthetic polypeptide"

SEQ ID NO: 574 - protein, 330 aa, Artificial Sequence; identical to SEQ ID NO: 544
  source: /note="Description of Artificial Sequence: Synthetic polypeptide"

SEQ ID NO: 575 - protein, 225 aa, Artificial Sequence
  source: /note="Description of Artificial Sequence: Synthetic polypeptide"
DIQMTQSPSSLSASVGDRVTITCKASQLVSSAVAWYQQKPGKAPKLLIYWASTLHTGVPSRFSGSGSGTDFTLTISSLQPEDFATYYCQQHYRTPFTFGQGTKLEIKRGGSGGGGSGDIQMTQSPSSLSASVGDRVTITCSASSGSISYIDWFQQKPGKAPKRLIYATFELASGVPSRFSGSGSGTDFTLTISSLQPEDFATYYCHQLGSYPDTFGQGTKLEIKR

SEQ ID NO: 576 - protein, 108 aa, Artificial Sequence; identical to SEQ ID NO: 84
  source: /note="Description of Artificial Sequence: Synthetic polypeptide"

SEQ ID NO: 577 - protein, 9 aa, Artificial Sequence
  source: /note="Description of Artificial Sequence: Synthetic peptide"
GGSGGGGSG

SEQ ID NO: 578 - protein, 108 aa, Artificial Sequence; identical to SEQ ID NO: 568
  source: /note="Description of Artificial Sequence: Synthetic polypeptide"

SEQ ID NO: 579 - protein, 106 aa, Artificial Sequence; identical to SEQ ID NO: 549
  source: /note="Description of Artificial Sequence: Synthetic polypeptide"

SEQ ID NO: 580 - protein, 248 aa, Artificial Sequence
  source: /note="Description of Artificial Sequence: Synthetic polypeptide"
EVQLVESGGGLVQPGGSLRLSCAASGFTFSNYGVTWVRQAPGKGLEWVSMIWADGSTHYASSVKGRFTISRDNSKNTLYLQMNSLRAEDTAVYYCAREWQHGPVAYWGQGTLVTVSSGGGGSGGGGSEVQLVQSGAEVKKPGSSVKVSCKASGYTFTDYEIHWVRQAPGQGLEWIGVNDPDSGGTLYNQKFDGRVTLTADESTSTAYMELSSLRSEDTAVYYCTRYDKWYSFEGMDIWGQGTTVTVSS

SEQ ID NO: 581 - protein, 117 aa, Artificial Sequence; identical to SEQ ID NO: 58
  source: /note="Description of Artificial Sequence: Synthetic polypeptide"

SEQ ID NO: 582 - protein, 10 aa, Artificial Sequence
  source: /note="Description of Artificial Sequence: Synthetic peptide"
GGGGSGGGGS

SEQ ID NO: 583 - protein, 121 aa, Artificial Sequence; identical to SEQ ID NO: 111
  source: /note="Description of Artificial Sequence: Synthetic polypeptide"

SEQ ID NO: 584 - protein, 330 aa, Artificial Sequence; identical to SEQ ID NO: 544
  source: /note="Description of Artificial Sequence: Synthetic polypeptide"

SEQ ID NO: 585 - protein, 225 aa, Artificial Sequence
  source: /note="Description of Artificial Sequence: Synthetic polypeptide"
DIQMTQSPSSLSASVGDRVTITCRASQLVSSAVAWYQQKPGKAPKLLIYWASARHTGVPSRFSGSGSGTDFTLTISSLQPEDFATYYCQQHYKTPFTFGQGTKLEIKRGGSGGGGSGDIQMTQSPSSLSASVGDRVTITCSASQGIRSYIDWFQQKPGKSPKRLIYATFDLASGVPSRFSGSGSGTDYTLTISSLQPEDFATYYCRQVGNYPGTFGQGTKLEIKR

SEQ ID NO: 586 - protein, 108 aa, Artificial Sequence; identical to SEQ ID NO: 78
  source: /note="Description of Artificial Sequence: Synthetic polypeptide"

SEQ ID NO: 587 - protein, 9 aa, Artificial Sequence
  source: /note="Description of Artificial Sequence: Synthetic peptide"
GGSGGGGSG

SEQ ID NO: 588 - protein, 108 aa, Artificial Sequence
  source: /note="Description of Artificial Sequence: Synthetic polypeptide"
DIQMTQSPSSLSASVGDRVTITCSASQGIRSYIDWFQQKPGKSPKRLIYATFDLASGVPSRFSGSGSGTDYTLTISSLQPEDFATYYCRQVGNYPGTFGQGTKLEIKR

SEQ ID NO: 589 - protein, 106 aa, Artificial Sequence; identical to SEQ ID NO: 549
  source: /note="Description of Artificial Sequence: Synthetic polypeptide"

SEQ ID NO: 590 - protein, 248 aa, Artificial Sequence
  source: /note="Description of Artificial Sequence: Synthetic polypeptide"
EVQLVESGGGLVQPGGSLRLSCAASGFTFSNYGVEWVRQAPGKGLEWVSGIWADGSTHYADTVKSRFTISRDNSKNTLYLQMNSLRAEDTAVYYCAREWQHGPVAYWGQGTLVTVSSGGGGSGGGGSEVQLVQSGAEVKKPGSSVKVSCKASGYTFTDYEIHWVRQAPGQGLEWIGVNDPDSGGTLYNQKFDGRVTLTADESTSTAYMELSSLRSEDTAVYYCTRYDKWYSFEGMDIWGQGTTVTVSS

SEQ ID NO: 591 - protein, 117 aa, Artificial Sequence; identical to SEQ ID NO: 59
  source: /note="Description of Artificial Sequence: Synthetic polypeptide"

SEQ ID NO: 592 - protein, 10 aa, Artificial Sequence
  source: /note="Description of Artificial Sequence: Synthetic peptide"
GGGGSGGGGS

SEQ ID NO: 593 - protein, 121 aa, Artificial Sequence; identical to SEQ ID NO: 111
  source: /note="Description of Artificial Sequence: Synthetic polypeptide"

SEQ ID NO: 594 - protein, 330 aa, Artificial Sequence; identical to SEQ ID NO: 544
  source: /note="Description of Artificial Sequence: Synthetic polypeptide"

SEQ ID NO: 595 - protein, 225 aa, Artificial Sequence
  source: /note="Description of Artificial Sequence: Synthetic polypeptide"
DIQMTQSPSSLSASVGDRVTITCKASQLVSSAVAWYQQKPGKAPKLLIYWASTLHTGVPSRFSGSGSGTDFTLTISSLQPEDFATYYCQQHYRTPFTFGQGTKLEIKRGGSGGGGSGDIQMTQSPSSLSASVGDRVTITCSASQGIRSYIDWFQQKPGKSPKRLIYATFDLASGVPSRFSGSGSGTDYTLTISSLQPEDFATYYCRQVGNYPGTFGQGTKLEIKR

SEQ ID NO: 596 - protein, 108 aa, Artificial Sequence; identical to SEQ ID NO: 84
  source: /note="Description of Artificial Sequence: Synthetic polypeptide"

SEQ ID NO: 597 - protein, 9 aa, Artificial Sequence
  source: /note="Description of Artificial Sequence: Synthetic peptide"
GGSGGGGSG

SEQ ID NO: 598 - protein, 108 aa, Artificial Sequence; identical to SEQ ID NO: 588
  source: /note="Description of Artificial Sequence: Synthetic polypeptide"

SEQ ID NO: 599 - protein, 106 aa, Artificial Sequence; identical to SEQ ID NO: 549
  source: /note="Description of Artificial Sequence: Synthetic polypeptide"

SEQ ID NO: 600 - protein, 248 aa, Artificial Sequence
  source: /note="Description of Artificial Sequence: Synthetic polypeptide"
EVQLVESGGGLVQPGGSLRLSCAASGFTFSNYGVTWVRQAPGKGLEWVSMIWADGSTHYASSVKGRFTISRDNSKNTLYLQMNSLRAEDTAVYYCAREWQHGPVAYWGQGTLVTVSSGGGGSGGGGSEVQLVQSGAEVKKPGSSVKVSCKASGYTFSDYEIHWVRQAPGQGLEWMGVNDPESGGTFYNQKFDGRVTLTADESTSTAYMELSSLRSEDTAVYYCTRYDKWYSFEGMDIWGQGTTVTVSS

SEQ ID NO: 601 - protein, 117 aa, Artificial Sequence; identical to SEQ ID NO: 58
  source: /note="Description of Artificial Sequence: Synthetic polypeptide"

SEQ ID NO: 602 - protein, 10 aa, Artificial Sequence
  source: /note="Description of Artificial Sequence: Synthetic peptide"
GGGGSGGGGS

SEQ ID NO: 603 - protein, 121 aa, Artificial Sequence; identical to SEQ ID NO: 113
  source: /note="Description of Artificial Sequence: Synthetic polypeptide"

SEQ ID NO: 604 - protein, 330 aa, Artificial Sequence; identical to SEQ ID NO: 544
  source: /note="Description of Artificial Sequence: Synthetic polypeptide"

SEQ ID NO: 605 - protein, 248 aa, Artificial Sequence
  source: /note="Description of Artificial Sequence: Synthetic polypeptide"
EVQLVESGGGLVQPGGSLRLSCAASGFTFSNYGVEWVRQAPGKGLEWVSGIWADGSTHYADTVKSRFTISRDNSKNTLYLQMNSLRAEDTAVYYCAREWQHGPVAYWGQGTLVTVSSGGGGSGGGGSEVQLVQSGAEVKKPGSSVKVSCKASGYTFSDYEIHWVRQAPGQGLEWMGVNDPESGGTFYNQKFDGRVTLTADESTSTAYMELSSLRSEDTAVYYCTRYDKWYSFEGMDIWGQGTTVTVSS

SEQ ID NO: 606 - protein, 117 aa, Artificial Sequence; identical to SEQ ID NO: 59
  source: /note="Description of Artificial Sequence: Synthetic polypeptide"

SEQ ID NO: 607 - protein, 10 aa, Artificial Sequence
  source: /note="Description of Artificial Sequence: Synthetic peptide"
GGGGSGGGGS

SEQ ID NO: 608 - protein, 121 aa, Artificial Sequence; identical to SEQ ID NO: 113
  source: /note="Description of Artificial Sequence: Synthetic polypeptide"

SEQ ID NO: 609 - protein, 330 aa, Artificial Sequence; identical to SEQ ID NO: 544
  source: /note="Description of Artificial Sequence: Synthetic polypeptide"

SEQ ID NO: 610 - protein, 248 aa, Artificial Sequence
  source: /note="Description of Artificial Sequence: Synthetic polypeptide"
EVQLVESGGGLVQPGGSLRLSCAASGFTFSNYGVTWVRQAPGKGLEWVSMIWADGSTHYASSVKGRFTISRDNSKNTLYLQMNSLRAEDTAVYYCAREWQHGPVAYWGQGTLVTVSSGGGGSGGGGSEVQLVQSGAEVKKPGSSVKVSCKASGYTFTDYEIHWVRQAPGQGLEWIGVNDPESGGTFYNQKFDGRVTLSADESTSTAYMELSSLRSEDTAVYYCTRYDKYWSFEGMDYWGQGTTVTVSS

SEQ ID NO: 611 - protein, 117 aa, Artificial Sequence; identical to SEQ ID NO: 58
  source: /note="Description of Artificial Sequence: Synthetic polypeptide"

SEQ ID NO: 612 - protein, 10 aa, Artificial Sequence
  source: /note="Description of Artificial Sequence: Synthetic peptide"
GGGGSGGGGS

SEQ ID NO: 613 - protein, 121 aa, Artificial Sequence; identical to SEQ ID NO: 112
  source: /note="Description of Artificial Sequence: Synthetic polypeptide"

SEQ ID NO: 614 - protein, 330 aa, Artificial Sequence; identical to SEQ ID NO: 544
  source: /note="Description of Artificial Sequence: Synthetic polypeptide"

SEQ ID NO: 615 - protein, 248 aa, Artificial Sequence
  source: /note="Description of Artificial Sequence: Synthetic polypeptide"
EVQLVESGGGLVQPGGSLRLSCAASGFTFSNYGVEWVRQAPGKGLEWVSGIWADGSTHYADTVKSRFTISRDNSKNTLYLQMNSLRAEDTAVYYCAREWQHGPVAYWGQGTLVTVSSGGGGSGGGGSEVQLVQSGAEVKKPGSSVKVSCKASGYTFTDYEIHWVRQAPGQGLEWIGVNDPESGGTFYNQKFDGRVTLSADESTSTAYMELSSLRSEDTAVYYCTRYDKYWSFEGMDYWGQGTTVTVSS

SEQ ID NO: 616 - protein, 117 aa, Artificial Sequence; identical to SEQ ID NO: 59
  source: /note="Description of Artificial Sequence: Synthetic polypeptide"

SEQ ID NO: 617 - protein, 10 aa, Artificial Sequence
  source: /note="Description of Artificial Sequence: Synthetic peptide"
GGGGSGGGGS

SEQ ID NO: 618 - protein, 121 aa, Artificial Sequence; identical to SEQ ID NO: 112
  source: /note="Description of Artificial Sequence: Synthetic polypeptide"

SEQ ID NO: 619 - protein, 330 aa, Artificial Sequence; identical to SEQ ID NO: 544
  source: /note="Description of Artificial Sequence: Synthetic polypeptide"

SEQ ID NO: 620 - protein, 248 aa, Artificial Sequence
  source: /note="Description of Artificial Sequence: Synthetic polypeptide"
EVQLVESGGGLVQPGGSLRLSCAASGFTFSNYGVTWVRQAPGKGLEWVSMIWADGSTHYASSVKGRFTISRDNSKNTLYLQMNSLRAEDTAVYYCAREWQHGPVAYWGQGTLVTVSSGGGGSGGGGSEVQLVQSGAEVKKPGSSVKVSCKASGYTFSDYEIHWVRQAPGQGLEWMGVNDPESGGTFYNQKFDGRVTLTADESTSTAYMELSSLRSEDTAVYYCTRYDKYWSFEGMDYWGQGTTVTVSS

SEQ ID NO: 621 - protein, 117 aa, Artificial Sequence; identical to SEQ ID NO: 58
  source: /note="Description of Artificial Sequence: Synthetic polypeptide"

SEQ ID NO: 622 - protein, 10 aa, Artificial Sequence
  source: /note="Description of Artificial Sequence: Synthetic peptide"
GGGGSGGGGS

SEQ ID NO: 623 - protein, 121 aa, Artificial Sequence; identical to SEQ ID NO: 114
  source: /note="Description of Artificial Sequence: Synthetic polypeptide"

SEQ ID NO: 624 - protein, 330 aa, Artificial Sequence; identical to SEQ ID NO: 544
  source: /note="Description of Artificial Sequence: Synthetic polypeptide"

SEQ ID NO: 625 - protein, 248 aa, Artificial Sequence
  source: /note="Description of Artificial Sequence: Synthetic polypeptide"
EVQLVESGGGLVQPGGSLRLSCAASGFTFSNYGVEWVRQAPGKGLEWVSGIWADGSTHYADTVKSRFTISRDNSKNTLYLQMNSLRAEDTAVYYCAREWQHGPVAYWGQGTLVTVSSGGGGSGGGGSEVQLVQSGAEVKKPGSSVKVSCKASGYTFSDYEIHWVRQAPGQGLEWMGVNDPESGGTFYNQKFDGRVTLTADESTSTAYMELSSLRSEDTAVYYCTRYDKYWSFEGMDYWGQGTTVTVSS

SEQ ID NO: 626 - protein, 117 aa, Artificial Sequence; identical to SEQ ID NO: 59
  source: /note="Description of Artificial Sequence: Synthetic polypeptide"

SEQ ID NO: 627 - protein, 10 aa, Artificial Sequence
  source: /note="Description of Artificial Sequence: Synthetic peptide"
GGGGSGGGGS

SEQ ID NO: 628 - protein, 121 aa, Artificial Sequence; identical to SEQ ID NO: 114
  source: /note="Description of Artificial Sequence: Synthetic polypeptide"

SEQ ID NO: 629 - protein, 330 aa, Artificial Sequence; identical to SEQ ID NO: 544
  source: /note="Description of Artificial Sequence: Synthetic polypeptide"

SEQ ID NO: 630 - protein, 248 aa, Artificial Sequence
  source: /note="Description of Artificial Sequence: Synthetic polypeptide"
EVQLVESGGGLVQPGGSLRLSCAASGFTFSNYGVTWVRQAPGKGLEWVSMIWADGSTHYASSVKGRFTISRDNSKNTLYLQMNSLRAEDTAVYYCAREWQHGPVAYWGQGTLVTVSSGGGGSGGGGSEVQLVQSGAEVKKPGSSVKVSCKASGYTFTDYEIHWVRQAPGQGLEWMGVNDPESGGTFYNQKFDGRVTLTADESTSTAYMELSSLRSEDTAVYYCTRYDKWYSFEGMDIWGQGTTVTVSS

SEQ ID NO: 631 - protein, 117 aa, Artificial Sequence; identical to SEQ ID NO: 58
  source: /note="Description of Artificial Sequence: Synthetic polypeptide"

SEQ ID NO: 632 - protein, 10 aa, Artificial Sequence
  source: /note="Description of Artificial Sequence: Synthetic peptide"
GGGGSGGGGS

SEQ ID NO: 633 - protein, 121 aa, Artificial Sequence; identical to SEQ ID NO: 115
  source: /note="Description of Artificial Sequence: Synthetic polypeptide"

SEQ ID NO: 634 - protein, 330 aa, Artificial Sequence; identical to SEQ ID NO: 544
  source: /note="Description of Artificial Sequence: Synthetic polypeptide"

SEQ ID NO: 635 - protein, 248 aa, Artificial Sequence
  source: /note="Description of Artificial Sequence: Synthetic polypeptide"
EVQLVESGGGLVQPGGSLRLSCAASGFTFSNYGVEWVRQAPGKGLEWVSGIWADGSTHYADTVKSRFTISRDNSKNTLYLQMNSLRAEDTAVYYCAREWQHGPVAYWGQGTLVTVSSGGGGSGGGGSEVQLVQSGAEVKKPGSSVKVSCKASGYTFTDYEIHWVRQAPGQGLEWMGVNDPESGGTFYNQKFDGRVTLTADESTSTAYMELSSLRSEDTAVYYCTRYDKWYSFEGMDIWGQGTTVTVSS

SEQ ID NO: 636 - protein, 117 aa, Artificial Sequence; identical to SEQ ID NO: 59
  source: /note="Description of Artificial Sequence: Synthetic polypeptide"

SEQ ID NO: 637 - protein, 10 aa, Artificial Sequence
  source: /note="Description of Artificial Sequence: Synthetic peptide"
GGGGSGGGGS

SEQ ID NO: 638 - protein, 121 aa, Artificial Sequence; identical to SEQ ID NO: 115
  source: /note="Description of Artificial Sequence: Synthetic polypeptide"

SEQ ID NO: 639 - protein, 330 aa, Artificial Sequence; identical to SEQ ID NO: 544
  source: /note="Description of Artificial Sequence: Synthetic polypeptide"

SEQ ID NO: 640 - protein, 248 aa, Artificial Sequence
  source: /note="Description of Artificial Sequence: Synthetic polypeptide"
EVQLVQSGAEVKKPGSSVKVSCKASGYTFDDYEIHWVRQAPGQGLEWIGVNDPESGGTFYNQKFDGRATLTADKSTSTAYMELSSLRSEDTAVYYCTRYDKWDSFYGMDYWGQGTTVTVSSGGGGSGGGGSEVQLVESGGGLVQPGGSLRLSCAASGFTFSNYGVTWVRQAPGKGLEWVSMIWADGSTHYASSVKGRFTISRDNSKNTLYLQMNSLRAEDTAVYYCAREWQHGPVAYWGQGTLVTVSS

SEQ ID NO: 641 - protein, 121 aa, Artificial Sequence; identical to SEQ ID NO: 109
  source: /note="Description of Artificial Sequence: Synthetic polypeptide"

SEQ ID NO: 642 - protein, 10 aa, Artificial Sequence
  source: /note="Description of Artificial Sequence: Synthetic peptide"
GGGGSGGGGS

SEQ ID NO: 643 - protein, 117 aa, Artificial Sequence; identical to SEQ ID NO: 58
  source: /note="Description of Artificial Sequence: Synthetic polypeptide"

SEQ ID NO: 644 - protein, 330 aa, Artificial Sequence; identical to SEQ ID NO: 544
  source: /note="Description of Artificial Sequence: Synthetic polypeptide"

SEQ ID NO: 645 - protein, 225 aa, Artificial Sequence
  source: /note="Description of Artificial Sequence: Synthetic polypeptide"
DIQMTQSPSSLSASVGDRVTITCSASSGSISYIDWFQQKPGKAPKRLIYATFELASGVPSRFSGSGSGTDFTLTISSLQPEDFATYYCHQLGSYPDTFGQGTKLEIKRGGSGGGGSGDIQMTQSPSSLSASVGDRVTITCRASQLVSSAVAWYQQKPGKAPKLLIYWASARHTGVPSRFSGSGSGTDFTLTISSLQPEDFATYYCQQHYKTPFTFGQGTKLEIKR

SEQ ID NO: 646 - protein, 108 aa, Artificial Sequence; identical to SEQ ID NO: 568
  source: /note="Description of Artificial Sequence: Synthetic polypeptide"

SEQ ID NO: 647 - protein, 9 aa, Artificial Sequence
  source: /note="Description of Artificial Sequence: Synthetic peptide"
GGSGGGGSG

SEQ ID NO: 648 - protein, 108 aa, Artificial Sequence; identical to SEQ ID NO: 78
  source: /note="Description of Artificial Sequence: Synthetic polypeptide"

SEQ ID NO: 649 - protein, 106 aa, Artificial Sequence; identical to SEQ ID NO: 549
  source: /note="Description of Artificial Sequence: Synthetic polypeptide"

SEQ ID NO: 650 - protein, 248 aa, Artificial Sequence
  source: /note="Description of Artificial Sequence: Synthetic polypeptide"
EVQLVQSGAEVKKPGSSVKVSCKASGYTFDDYEIHWVRQAPGQGLEWIGVNDPESGGTFYNQKFDGRATLTADKSTSTAYMELSSLRSEDTAVYYCTRYDKWDSFYGMDYWGQGTTVTVSSGGGGSGGGGSEVQLVESGGGLVQPGGSLRLSCAASGFTFSNYGVEWVRQAPGKGLEWVSGIWADGSTHYADTVKSRFTISRDNSKNTLYLQMNSLRAEDTAVYYCAREWQHGPVAYWGQGTLVTVSS

SEQ ID NO: 651 - protein, 121 aa, Artificial Sequence; identical to SEQ ID NO: 109
  source: /note="Description of Artificial Sequence: Synthetic polypeptide"

SEQ ID NO: 652 - protein, 10 aa, Artificial Sequence
  source: /note="Description of Artificial Sequence: Synthetic peptide"
GGGGSGGGGS

SEQ ID NO: 653 - protein, 117 aa, Artificial Sequence; identical to SEQ ID NO: 59
  source: /note="Description of Artificial Sequence: Synthetic polypeptide"

SEQ ID NO: 654 - protein, 330 aa, Artificial Sequence; identical to SEQ ID NO: 544
  source: /note="Description of Artificial Sequence: Synthetic polypeptide"

SEQ ID NO: 655 - protein, 225 aa, Artificial Sequence
  source: /note="Description of Artificial Sequence: Synthetic polypeptide"
DIQMTQSPSSLSASVGDRVTITCSASSGSISYIDWFQQKPGKAPKRLIYATFELASGVPSRFSGSGSGTDFTLTISSLQPEDFATYYCHQLGSYPDTFGQGTKLEIKRGGSGGGGSGDIQMTQSPSSLSASVGDRVTITCKASQLVSSAVAWYQQKPGKAPKLLIYWASTLHTGVPSRFSGSGSGTDFTLTISSLQPEDFATYYCQQHYRTPFTFGQGTKLEIKR

SEQ ID NO: 656 - protein, 108 aa, Artificial Sequence; identical to SEQ ID NO: 568
  source: /note="Description of Artificial Sequence: Synthetic polypeptide"

SEQ ID NO: 657 - protein, 9 aa, Artificial Sequence
  source: /note="Description of Artificial Sequence: Synthetic peptide"
GGSGGGGSG

SEQ ID NO: 658 - protein, 108 aa, Artificial Sequence; identical to SEQ ID NO: 84
  source: /note="Description of Artificial Sequence: Synthetic polypeptide"

SEQ ID NO: 659 - protein, 106 aa, Artificial Sequence; identical to SEQ ID NO: 549
  source: /note="Description of Artificial Sequence: Synthetic polypeptide"

SEQ ID NO: 660 - protein, 255 aa, Artificial Sequence
  source: /note="Description of Artificial Sequence: Synthetic polypeptide"
EVQLVQSGAEVKKPGASVKVSCKASGYTFANYGIIWVRQAPGQGLEWMGWINTYTGKPTYAQKFQGRVTMTTDTSTSTAYMELSSLRSEDTAVYYCARKLFTTMDVTDNAMDYWGQGTTVTVSSGGGGSGGGGSEVQLVQSGAEVKKPGSSVKVSCKASGYTFTDYEIHWVRQAPGQGLEWMGVNDPESGGTFYNQKFDGRVTLTADESTSTAYMELSSLRSEDTAVYYCTRYSKWDSFDGMDYWGQGTTVTVSS

SEQ ID NO: 661 - protein, 124 aa, Artificial Sequence; identical to SEQ ID NO: 88
  source: /note="Description of Artificial Sequence: Synthetic polypeptide"

SEQ ID NO: 662 - protein, 10 aa, Artificial Sequence
  source: /note="Description of Artificial Sequence: Synthetic peptide"
GGGGSGGGGS

SEQ ID NO: 663 - protein, 121 aa, Artificial Sequence; identical to SEQ ID NO: 30
  source: /note="Description of Artificial Sequence: Synthetic polypeptide"

SEQ ID NO: 664 - protein, 330 aa, Artificial Sequence; identical to SEQ ID NO: 544
  source: /note="Description of Artificial Sequence: Synthetic polypeptide"

SEQ ID NO: 665 - protein, 225 aa, Artificial Sequence
  source: /note="Description of Artificial Sequence: Synthetic polypeptide"
DIQMTQSPSSLSASVGDRVTITCRASQDISQYLNWYQQKPGKAPKLLIYYTSRLQSGVPSRFSGSGSGTDFTLTISSLQPEDFATYFCQQGNTWPPTFGQGTKLEIKRGGSGGGGSGDIQMTQSPSSLSASVGDRVTITCRASSGIISYIDWFQQKPGKAPKRLIYATFDLASGVPSRFSGSGSGTDYTLTISSLQPEDFATYYCRQVGSYPETFGQGTKLEIKR

SEQ ID NO: 666 - protein, 108 aa, Artificial Sequence
  source: /note="Description of Artificial Sequence: Synthetic polypeptide"
DIQMTQSPSSLSASVGDRVTITCRASQDISQYLNWYQQKPGKAPKLLIYYTSRLQSGVPSRFSGSGSGTDFTLTISSLQPEDFATYFCQQGNTWPPTFGQGTKLEIKR

SEQ ID NO: 667 - protein, 9 aa, Artificial Sequence
  source: /note="Description of Artificial Sequence: Synthetic peptide"
GGSGGGGSG

SEQ ID NO: 668 - protein, 108 aa, Artificial Sequence; identical to SEQ ID NO: 31
  source: /note="Description of Artificial Sequence: Synthetic polypeptide"

SEQ ID NO: 669 - protein, 106 aa, Artificial Sequence; identical to SEQ ID NO: 549
  source: /note="Description of Artificial Sequence: Synthetic polypeptide"

SEQ ID NO: 670 - protein, 255 aa, Artificial Sequence
  source: /note="Description of Artificial Sequence: Synthetic polypeptide"
EVQLVQSGAEVKKPGASVKVSCKASGYTFANYGIIWVRQAPGQGLEWMGWINTYTGKPTYAQKFQGRVTMTTDTSTSTAYMELSSLRSEDTAVYYCARKLFTTMDVTDNAMDYWGQGTTVTVSSGGGGSGGGGSEVQLVQSGAEVKKPGSSVKVSCKASGYTFDDYEIHWVRQAPGQGLEWIGVNDPESGGTFYNQKFDGRATLTADKSTSTAYMELSSLRSEDTAVYYCTRYDKWDSFYGMDYWGQGTTVTVSS

SEQ ID NO: 671 - protein, 124 aa, Artificial Sequence; identical to SEQ ID NO: 88
  source: /note="Description of Artificial Sequence: Synthetic polypeptide"

SEQ ID NO: 672 - protein, 10 aa, Artificial Sequence
  source: /note="Description of Artificial Sequence: Synthetic peptide"
GGGGSGGGGS

SEQ ID NO: 673 - protein, 121 aa, Artificial Sequence; identical to SEQ ID NO: 109
  source: /note="Description of Artificial Sequence: Synthetic polypeptide"

SEQ ID NO: 674 - protein, 330 aa, Artificial Sequence; identical to SEQ ID NO: 544
  source: /note="Description of Artificial Sequence: Synthetic polypeptide"

SEQ ID NO: 675 - protein, 225 aa, Artificial Sequence
  source: /note="Description of Artificial Sequence: Synthetic polypeptide"
DIQMTQSPSSLSASVGDRVTITCRASQDISQYLNWYQQKPGKAPKLLIYYTSRLQSGVPSRFSGSGSGTDFTLTISSLQPEDFATYFCQQGNTWPPTFGQGTKLEIKRGGSGGGGSGDIQMTQSPSSLSASVGDRVTITCSASSGSISYIDWFQQKPGKAPKRLIYATFELASGVPSRFSGSGSGTDFTLTISSLQPEDFATYYCHQLGSYPDTFGQGTKLEIKR

SEQ ID NO: 676 - protein, 108 aa, Artificial Sequence; identical to SEQ ID NO: 666
  source: /note="Description of Artificial Sequence: Synthetic polypeptide"

SEQ ID NO: 677 - protein, 9 aa, Artificial Sequence
  source: /note="Description of Artificial Sequence: Synthetic peptide"
GGSGGGGSG

SEQ ID NO: 678 - protein, 108 aa, Artificial Sequence; identical to SEQ ID NO: 568
  source: /note="Description of Artificial Sequence: Synthetic polypeptide"

SEQ ID NO: 679 - protein, 106 aa, Artificial Sequence; identical to SEQ ID NO: 549
  source: /note="Description of Artificial Sequence: Synthetic polypeptide"

SEQ ID NO: 680 - protein, 255 aa, Artificial Sequence
  source: /note="Description of Artificial Sequence: Synthetic polypeptide"
EVQLVQSGAEVKKPGASVKVSCKASGYTFNNYGIIWVRQAPGQGLEWMGWINTYSGKPTYAQKFQGRVTMTTDTSTSTAYMELSSLRSEDTAVYFCARKLFTTMDVTDNAMDYWGQGTTVTVSSGGGGSGGGGSEVQLVQSGAEVKKPGSSVKVSCKASGYTFTDYEIHWVRQAPGQGLEWMGVNDPESGGTFYNQKFDGRVTLTADESTSTAYMELSSLRSEDTAVYYCTRYSKWDSFDGMDYWGQGTTVTVSS

SEQ ID NO: 681 - protein, 124 aa, Artificial Sequence; identical to SEQ ID NO: 97
  source: /note="Description of Artificial Sequence: Synthetic polypeptide"

SEQ ID NO: 682 - protein, 10 aa, Artificial Sequence
  source: /note="Description of Artificial Sequence: Synthetic peptide"
GGGGSGGGGS

SEQ ID NO: 683 - protein, 121 aa, Artificial Sequence; identical to SEQ ID NO: 30
  source: /note="Description of Artificial Sequence: Synthetic polypeptide"

SEQ ID NO: 684 - protein, 330 aa, Artificial Sequence; identical to SEQ ID NO: 544
  source: /note="Description of Artificial Sequence: Synthetic polypeptide"

SEQ ID NO: 685 - protein, 225 aa, Artificial Sequence
  source: /note="Description of Artificial Sequence: Synthetic polypeptide"
DIQMTQSPSSLSASVGDRVTITCRASQDISNFLNWYQQKPGKAPKLLIYYTSRLQSGVPSRFSGSGSGTDYTLTISSLQPEDFATYFCQQGNTQPPTFGQGTKLEIKRGGSGGGGSGDIQMTQSPSSLSASVGDRVTITCRASSGIISYIDWFQQKPGKAPKRLIYATFDLASGVPSRFSGSGSGTDYTLTISSLQPEDFATYYCRQVGSYPETFGQGTKLEIKR

SEQ ID NO: 686 - protein, 108 aa, Artificial Sequence
  source: /note="Description of Artificial Sequence: Synthetic polypeptide"
DIQMTQSPSSLSASVGDRVTITCRASQDISNFLNWYQQKPGKAPKLLIYYTSRLQSGVPSRFSGSGSGTDYTLTISSLQPEDFATYFCQQGNTQPPTFGQGTKLEIKR

SEQ ID NO: 687 - protein, 9 aa, Artificial Sequence
  source: /note="Description of Artificial Sequence: Synthetic peptide"
GGSGGGGSG

SEQ ID NO: 688 - protein, 108 aa, Artificial Sequence; identical to SEQ ID NO: 31
  source: /note="Description of Artificial Sequence: Synthetic polypeptide"

SEQ ID NO: 689 - protein, 106 aa, Artificial Sequence; identical to SEQ ID NO: 549
  source: /note="Description of Artificial Sequence: Synthetic polypeptide"

SEQ ID NO: 690 - protein, 255 aa, Artificial Sequence
  source: /note="Description of Artificial Sequence: Synthetic polypeptide"
EVQLVQSGAEVKKPGASVKVSCKASGYTFNNYGIIWVRQAPGQGLEWMGWINTYSGKPTYAQKFQGRVTMTTDTSTSTAYMELSSLRSEDTAVYFCARKLFTTMDVTDNAMDYWGQGTTVTVSSGGGGSGGGGSEVQLVQSGAEVKKPGSSVKVSCKASGYTFDDYEIHWVRQAPGQGLEWIGVNDPESGGTFYNQKFDGRATLTADKSTSTAYMELSSLRSEDTAVYYCTRYDKWDSFYGMDYWGQGTTVTVSS

SEQ ID NO: 691 - protein, 124 aa, Artificial Sequence; identical to SEQ ID NO: 97
  source: /note="Description of Artificial Sequence: Synthetic polypeptide"

SEQ ID NO: 692 - protein, 10 aa, Artificial Sequence
  source: /note="Description of Artificial Sequence: Synthetic peptide"
GGGGSGGGGS

SEQ ID NO: 693 - protein, 121 aa, Artificial Sequence; identical to SEQ ID NO: 109
  source: /note="Description of Artificial Sequence: Synthetic polypeptide"

SEQ ID NO: 694 - protein, 330 aa, Artificial Sequence; identical to SEQ ID NO: 544
  source: /note="Description of Artificial Sequence: Synthetic polypeptide"

SEQ ID NO: 695 - protein, 225 aa, Artificial Sequence
  source: /note="Description of Artificial Sequence: Synthetic polypeptide"
DIQMTQSPSSLSASVGDRVTITCRASQDISNFLNWYQQKPGKAPKLLIYYTSRLQSGVPSRFSGSGSGTDYTLTISSLQPEDFATYFCQQGNTQPPTFGQGTKLEIKRGGSGGGGSGDIQMTQSPSSLSASVGDRVTITCSASSGSISYIDWFQQKPGKAPKRLIYATFELASGVPSRFSGSGSGTDFTLTISSLQPEDFATYYCHQLGSYPDTFGQGTKLEIKR

SEQ ID NO: 696 - protein, 108 aa, Artificial Sequence; identical to SEQ ID NO: 686
  source: /note="Description of Artificial Sequence: Synthetic polypeptide"

SEQ ID NO: 697 - protein, 9 aa, Artificial Sequence
  source: /note="Description of Artificial Sequence: Synthetic peptide"
GGSGGGGSG

SEQ ID NO: 698 - protein, 108 aa, Artificial Sequence; identical to SEQ ID NO: 568
  source: /note="Description of Artificial Sequence: Synthetic polypeptide"

SEQ ID NO: 699 - protein, 106 aa, Artificial Sequence; identical to SEQ ID NO: 549
  source: /note="Description of Artificial Sequence: Synthetic polypeptide"

SEQ ID NO: 700 - protein, 255 aa, Artificial Sequence
  source: /note="Description of Artificial Sequence: Synthetic polypeptide"
EVQLVQSGAEVKKPGASVKVSCKASGYTFNNYGINWVRQAPGQGLEWMGWINTYTGKPTYAQKFQGRVTMTTDTSTSTAYMELSSLRSEDTAVYFCARKFRNTVAVTDYAMDYWGQGTTVTVSSGGGGSGGGGSEVQLVQSGAEVKKPGSSVKVSCKASGYTFTDYEIHWVRQAPGQGLEWMGVNDPESGGTFYNQKFDGRVTLTADESTSTAYMELSSLRSEDTAVYYCTRYSKWDSFDGMDYWGQGTTVTVSS

SEQ ID NO: 701 - protein, 124 aa, Artificial Sequence; identical to SEQ ID NO: 93
  source: /note="Description of Artificial Sequence: Synthetic polypeptide"

SEQ ID NO: 702 - protein, 10 aa, Artificial Sequence
  source: /note="Description of Artificial Sequence: Synthetic peptide"
GGGGSGGGGS

SEQ ID NO: 703 - protein, 121 aa, Artificial Sequence; identical to SEQ ID NO: 30
  source: /note="Description of Artificial Sequence: Synthetic polypeptide"

SEQ ID NO: 704 - protein, 330 aa, Artificial Sequence; identical to SEQ ID NO: 544
  source: /note="Description of Artificial Sequence: Synthetic polypeptide"

SEQ ID NO: 705 - protein, 225 aa, Artificial Sequence
  source: /note="Description of Artificial Sequence: Synthetic polypeptide"
DIQMTQSPSSLSASVGDRVTITCRASQDIYDVLNWYQQKPGKAPKLLIYYASRLQSGVPSRFSGSGSGTDFTLTISSLQPEDFATYYCQQGITLPPTFGQGTKLEIKRGGSGGGGSGDIQMTQSPSSLSASVGDRVTITCRASSGIISYIDWFQQKPGKAPKRLIYATFDLASGVPSRFSGSGSGTDYTLTISSLQPEDFATYYCRQVGSYPETFGQGTKLEIKR

SEQ ID NO: 706 - protein, 108 aa, Artificial Sequence
  source: /note="Description of Artificial Sequence: Synthetic polypeptide"
DIQMTQSPSSLSASVGDRVTITCRASQDIYDVLNWYQQKPGKAPKLLIYYASRLQSGVPSRFSGSGSGTDFTLTISSLQPEDFATYYCQQGITLPPTFGQGTKLEIKR

SEQ ID NO: 707 - protein, 9 aa, Artificial Sequence
  source: /note="Description of Artificial Sequence: Synthetic peptide"
GGSGGGGSG

SEQ ID NO: 708 - protein, 108 aa, Artificial Sequence; identical to SEQ ID NO: 31
  source: /note="Description of Artificial Sequence: Synthetic polypeptide"

SEQ ID NO: 709 - protein, 106 aa, Artificial Sequence; identical to SEQ ID NO: 549
  source: /note="Description of Artificial Sequence: Synthetic polypeptide"

SEQ ID NO: 710 - protein, 255 aa, Artificial Sequence
  source: /note="Description of Artificial Sequence: Synthetic polypeptide"
EVQLVQSGAEVKKPGASVKVSCKASGYTFNNYGINWVRQAPGQGLEWMGWINTYTGKPTYAQKFQGRVTMTTDTSTSTAYMELSSLRSEDTAVYFCARKFRNTVAVTDYAMDYWGQGTTVTVSSGGGGSGGGGSEVQLVQSGAEVKKPGSSVKVSCKASGYTFDDYEIHWVRQAPGQGLEWIGVNDPESGGTFYNQKFDGRATLTADKSTSTAYMELSSLRSEDTAVYYCTRYDKWDSFYGMDYWGQGTTVTVSS

SEQ ID NO: 711 - protein, 124 aa, Artificial Sequence; identical to SEQ ID NO: 93
  source: /note="Description of Artificial Sequence: Synthetic polypeptide"

SEQ ID NO: 712 - protein, 10 aa, Artificial Sequence
  source: /note="Description of Artificial Sequence: Synthetic peptide"
GGGGSGGGGS

SEQ ID NO: 713 - protein, 121 aa, Artificial Sequence; identical to SEQ ID NO: 109
  source: /note="Description of Artificial Sequence: Synthetic polypeptide"

SEQ ID NO: 714 - protein, 330 aa, Artificial Sequence; identical to SEQ ID NO: 544
  source: /note="Description of Artificial Sequence: Synthetic polypeptide"

SEQ ID NO: 715 - protein, 225 aa, Artificial Sequence
  source: /note="Description of Artificial Sequence: Synthetic polypeptide"
DIQMTQSPSSLSASVGDRVTITCRASQDIYDVLNWYQQKPGKAPKLLIYYASRLQSGVPSRFSGSGSGTDFTLTISSLQPEDFATYYCQQGITLPPTFGQGTKLEIKRGGSGGGGSGDIQMTQSPSSLSASVGDRVTITCSASSGSISYIDWFQQKPGKAPKRLIYATFELASGVPSRFSGSGSGTDFTLTISSLQPEDFATYYCHQLGSYPDTFGQGTKLEIKR

SEQ ID NO: 716 - protein, 108 aa, Artificial Sequence; identical to SEQ ID NO: 706
  source: /note="Description of Artificial Sequence: Synthetic polypeptide"

SEQ ID NO: 717 - protein, 9 aa, Artificial Sequence
  source: /note="Description of Artificial Sequence: Synthetic peptide"
GGSGGGGSG

SEQ ID NO: 718 - protein, 108 aa, Artificial Sequence; identical to SEQ ID NO: 568
  source: /note="Description of Artificial Sequence: Synthetic polypeptide"

SEQ ID NO: 719 - protein, 106 aa, Artificial Sequence; identical to SEQ ID NO: 549
  source: /note="Description of Artificial Sequence: Synthetic polypeptide"

SEQ ID NO: 720 - protein, 255 aa, Artificial Sequence
  source: /note="Description of Artificial Sequence: Synthetic polypeptide"
EVQLVQSGAEVKKPGASVKVSCKASGYTFNNYGIIWVRQAPGQGLEWMGWINTYTGKPTYAQKFQGRVTMTTDTSTSTAYMELSSLRSEDTAVYYCARKLFNTVAVTDNAMDYWGQGTTVTVSSGGGGSGGGGSEVQLVQSGAEVKKPGSSVKVSCKASGYTFTDYEIHWVRQAPGQGLEWMGVNDPESGGTFYNQKFDGRVTLTADESTSTAYMELSSLRSEDTAVYYCTRYSKWDSFDGMDYWGQGTTVTVSS

SEQ ID NO: 721 - protein, 124 aa, Artificial Sequence; identical to SEQ ID NO: 91
  source: /note="Description of Artificial Sequence: Synthetic polypeptide"

SEQ ID NO: 722 - protein, 10 aa, Artificial Sequence
  source: /note="Description of Artificial Sequence: Synthetic peptide"
GGGGSGGGGS

SEQ ID NO: 723 - protein, 121 aa, Artificial Sequence; identical to SEQ ID NO: 30
  source: /note="Description of Artificial Sequence: Synthetic polypeptide"

SEQ ID NO: 724 - protein, 330 aa, Artificial Sequence; identical to SEQ ID NO: 544
  source: /note="Description of Artificial Sequence: Synthetic polypeptide"

SEQ ID NO: 725 - protein, 225 aa, Artificial Sequence
  source: /note="Description of Artificial Sequence: Synthetic polypeptide"
DIQMTQSPSSLSASVGDRVTITCRASQDIENYLNWYQQKPGKAPKLLIYYTSRLQSGVPSRFSGSGSGTDFTLTISSLQPEDFATYFCQQGNTQPPTFGQGTKLEIKRGGSGGGGSGDIQMTQSPSSLSASVGDRVTITCRASSGIISYIDWFQQKPGKAPKRLIYATFDLASGVPSRFSGSGSGTDYTLTISSLQPEDFATYYCRQVGSYPETFGQGTKLEIKR

SEQ ID NO: 726 - protein, 108 aa, Artificial Sequence
  source: /note="Description of Artificial Sequence: Synthetic polypeptide"
DIQMTQSPSSLSASVGDRVTITCRASQDIENYLNWYQQKPGKAPKLLIYYTSRLQSGVPSRFSGSGSGTDFTLTISSLQPEDFATYFCQQGNTQPPTFGQGTKLEIKR

SEQ ID NO: 727 - protein, 9 aa, Artificial Sequence
  source: /note="Description of Artificial Sequence: Synthetic peptide"
GGSGGGGSG

SEQ ID NO: 728 - protein, 108 aa, Artificial Sequence; identical to SEQ ID NO: 31
  source: /note="Description of Artificial Sequence: Synthetic polypeptide"

SEQ ID NO: 729 - protein, 106 aa, Artificial Sequence; identical to SEQ ID NO: 549
  source: /note="Description of Artificial Sequence: Synthetic polypeptide"

SEQ ID NO: 730 - protein, 244 aa, Artificial Sequence
  source: /note="Description of Artificial Sequence: Synthetic polypeptide"
EVQLVESGGGLVQPGGSLRLSCAASGFTFSNYGVEWVRQAPGKGLEWVSGIWADGSTHYADTVKSRFTISRDNSKNTLYLQMNSLRAEDTAVYYCAREWQHGPVAYWGQGTLVTVSSASTKGPEVQLVQSGAEVKKPGSSVKVSCKASGYTFTDYEIHWVRQAPGQGLEWMGVNDPESGGTFYNQKFDGRVTLTADESTSTAYMELSSLRSEDTAVYYCTRYSKWDSFDGMDYWGQGTTVTVSS

SEQ ID NO: 731 - protein, 117 aa, Artificial Sequence; identical to SEQ ID NO: 59
  source: /note="Description of Artificial Sequence: Synthetic polypeptide"

SEQ ID NO: 732 - protein, 6 aa, Artificial Sequence
  source: /note="Description of Artificial Sequence: Synthetic peptide"
ASTKGP

SEQ ID NO: 733 - protein, 121 aa, Artificial Sequence; identical to SEQ ID NO: 30
  source: /note="Description of Artificial Sequence: Synthetic polypeptide"

SEQ ID NO: 734 - protein, 330 aa, Artificial Sequence
  source: /note="Description of Artificial Sequence: Synthetic polypeptide"
ASTKGPSVFPLAPSSKSTSGGTAALGCLVKDYFPEPVTVSWNSGALTSGVHTFPAVLQSSGLYSLSSVVTVPSSSLGTQTYICNVNHKPSNTKVDKKVEPKSCDKTHTCPPCPAPELLGGPSVFLFPPKPKDTLMISRTPEVTCVVVDVSHEDPEVKFNWYVDGVEVHNAKTKPREEQYNSTYRVVSVLTVLHQDWLNGKEYKCKVSNKALPAPIEKTISKAKGQPREPQVYTLPPSREEMTKNQVSLTCLVKGFYPSDIAVEWESNGQPENNYKTTPPVLDSDGSFFLYSKLTVDKSRWQQGNVFSCSVMHEALHNHYTQKSLSLSPGK

SEQ ID NO: 735 - protein, 221 aa, Artificial Sequence
  source: /note="Description of Artificial Sequence: Synthetic polypeptide"
DIQMTQSPSSLSASVGDRVTITCKASQLVSSAVAWYQQKPGKAPKLLIYWASTLHTGVPSRFSGSGSGTDFTLTISSLQPEDFATYYCQQHYRTPFTFGQGTKLEIKRTVAAPDIQMTQSPSSLSASVGDRVTITCRASSGIISYIDWFQQKPGKAPKRLIYATFDLASGVPSRFSGSGSGTDYTLTISSLQPEDFATYYCRQVGSYPETFGQGTKLEIKR

SEQ ID NO: 736 - protein, 108 aa, Artificial Sequence; identical to SEQ ID NO: 84
  source: /note="Description of Artificial Sequence: Synthetic polypeptide"

SEQ ID NO: 737 - protein, 5 aa, Artificial Sequence
  source: /note="Description of Artificial Sequence: Synthetic peptide"
TVAAP

SEQ ID NO: 738 - protein, 108 aa, Artificial Sequence; identical to SEQ ID NO: 31
  source: /note="Description of Artificial Sequence: Synthetic polypeptide"

SEQ ID NO: 739 - protein, 106 aa, Artificial Sequence; identical to SEQ ID NO: 549
  source: /note="Description of Artificial Sequence: Synthetic polypeptide"

SEQ ID NO: 740 - protein, 251 aa, Artificial Sequence
  source: /note="Description of Artificial Sequence: Synthetic polypeptide"
EVQLVQSGAEVKKPGASVKVSCKASGYTFNNYGIIWVRQAPGQGLEWMGWINTYTGKPTYAQKFQGRVTMTTDTSTSTAYMELSSLRSEDTAVYYCARKLFNTVAVTDNAMDYWGQGTTVTVSSASTKGPEVQLVQSGAEVKKPGSSVKVSCKASGYTFTDYEIHWVRQAPGQGLEWMGVNDPESGGTFYNQKFDGRVTLTADESTSTAYMELSSLRSEDTAVYYCTRYSKWDSFDGMDYWGQGTTVTVSS

SEQ ID NO: 741 - protein, 124 aa, Artificial Sequence; identical to SEQ ID NO: 91
  source: /note="Description of Artificial Sequence: Synthetic polypeptide"

SEQ ID NO: 742 - protein, 6 aa, Artificial Sequence
  source: /note="Description of Artificial Sequence: Synthetic peptide"
ASTKGP

SEQ ID NO: 743 - protein, 121 aa, Artificial Sequence; identical to SEQ ID NO: 30
  source: /note="Description of Artificial Sequence: Synthetic polypeptide"

SEQ ID NO: 744 - protein, 330 aa, Artificial Sequence; identical to SEQ ID NO: 734
  source: /note="Description of Artificial Sequence: Synthetic polypeptide"

SEQ ID NO: 745 - protein, 221 aa, Artificial Sequence
  source: /note="Description of Artificial Sequence: Synthetic polypeptide"
DIQMTQSPSSLSASVGDRVTITCRASQDIENYLNWYQQKPGKAPKLLIYYTSRLQSGVPSRFSGSGSGTDFTLTISSLQPEDFATYFCQQGNTQPPTFGQGTKLEIKRTVAAPDIQMTQSPSSLSASVGDRVTITCRASSGIISYIDWFQQKPGKAPKRLIYATFDLASGVPSRFSGSGSGTDYTLTISSLQPEDFATYYCRQVGSYPETFGQGTKLEIKR

SEQ ID NO: 746 - protein, 108 aa, Artificial Sequence; identical to SEQ ID NO: 726
  source: /note="Description of Artificial Sequence: Synthetic polypeptide"

SEQ ID NO: 747 - protein, 9 aa, Artificial Sequence
  source: /note="Description of Artificial Sequence: Synthetic peptide"
GGSGGGGSG

SEQ ID NO: 748 - protein, 108 aa, Artificial Sequence; identical to SEQ ID NO: 31
  source: /note="Description of Artificial Sequence: Synthetic polypeptide"

SEQ ID NO: 749 - protein, 106 aa, Artificial Sequence; identical to SEQ ID NO: 549
  source: /note="Description of Artificial Sequence: Synthetic polypeptide"

SEQ ID NO: 750 - protein, 251 aa, Artificial Sequence
  source: /note="Description of Artificial Sequence: Synthetic polypeptide"
EVQLVQSGAEVKKPGSSVKVSCKASGYTFTDYEIHWVRQAPGQGLEWMGVNDPESGGTFYNQKFDGRVTLTADESTSTAYMELSSLRSEDTAVYYCTRYSKWDSFDGMDYWGQGTTVTVSSASTKGPEVQLVQSGAEVKKPGASVKVSCKASGYTFNNYGIIWVRQAPGQGLEWMGWINTYTGKPTYAQKFQGRVTMTTDTSTSTAYMELSSLRSEDTAVYYCARKLFNTVAVTDNAMDYWGQGTTVTVSS

SEQ ID NO: 751 - protein, 121 aa, Artificial Sequence; identical to SEQ ID NO: 30
  source: /note="Description of Artificial Sequence: Synthetic polypeptide"

SEQ ID NO: 752 - protein, 6 aa, Artificial Sequence
  source: /note="Description of Artificial Sequence: Synthetic peptide"
ASTKGP

SEQ ID NO: 753 - protein, 124 aa, Artificial Sequence; identical to SEQ ID NO: 91
  source: /note="Description of Artificial Sequence: Synthetic polypeptide"

SEQ ID NO: 754 - protein, 330 aa, Artificial Sequence; identical to SEQ ID NO: 734
  source: /note="Description of Artificial Sequence: Synthetic polypeptide"

SEQ ID NO: 755 - protein, 221 aa, Artificial Sequence
  source: /note="Description of Artificial Sequence: Synthetic polypeptide"
DIQMTQSPSSLSASVGDRVTITCRASSGIISYIDWFQQKPGKAPKRLIYATFDLASGVPSRFSGSGSGTDYTLTISSLQPEDFATYYCRQVGSYPETFGQGTKLEIKRTVAAPDIQMTQSPSSLSASVGDRVTITCRASQDIENYLNWYQQKPGKAPKLLIYYTSRLQSGVPSRFSGSGSGTDFTLTISSLQPEDFATYFCQQGNTQPPTFGQGTKLEIKR

SEQ ID NO: 756 - protein, 108 aa, Artificial Sequence; identical to SEQ ID NO: 726
  source: /note="Description of Artificial Sequence: Synthetic polypeptide"

SEQ ID NO: 757 - protein, 5 aa, Artificial Sequence
  source: /note="Description of Artificial Sequence: Synthetic peptide"
TVAAP

SEQ ID NO: 758 - protein, 108 aa, Artificial Sequence; identical to SEQ ID NO: 726
  source: /note="Description of Artificial Sequence: Synthetic polypeptide"

SEQ ID NO: 759 - protein, 106 aa, Artificial Sequence; identical to SEQ ID NO: 549
  source: /note="Description of Artificial Sequence: Synthetic polypeptide"

SEQ ID NO: 760 - protein, 255 aa, Artificial Sequence
  source: /note="Description of Artificial Sequence: Synthetic polypeptide"
EVQLVQSGAEVKKPGSSVKVSCKASGYTFTDYEIHWVRQAPGQGLEWMGVNDPESGGTFYNQKFDGRVTLTADESTSTAYMELSSLRSEDTAVYYCTRYSKWDSFDGMDYWGQGTTVTVSSGGGGSGGGGSEVQLVQSGAEVKKPGASVKVSCKASGYTFNNYGIIWVRQAPGQGLEWMGWINTYTGKPTYAQKFQGRVTMTTDTSTSTAYMELSSLRSEDTAVYYCARKLFNTVAVTDNAMDYWGQGTTVTVSS

SEQ ID NO: 761 - protein, 121 aa, Artificial Sequence; identical to SEQ ID NO: 30
  source: /note="Description of Artificial Sequence: Synthetic polypeptide"

SEQ ID NO: 762 - protein, 10 aa, Artificial Sequence
  source: /note="Description of Artificial Sequence: Synthetic peptide"
GGGGSGGGGS

SEQ ID NO: 763 - protein, 124 aa, Artificial Sequence; identical to SEQ ID NO: 91
  source: /note="Description of Artificial Sequence: Synthetic polypeptide"

SEQ ID NO: 764 - protein, 330 aa, Artificial Sequence; identical to SEQ ID NO: 734
  source: /note="Description of Artificial Sequence: Synthetic polypeptide"

SEQ ID NO: 765 - protein, 225 aa, Artificial Sequence
  source: /note="Description of Artificial Sequence: Synthetic polypeptide"
DIQMTQSPSSLSASVGDRVTITCRASSGIISYIDWFQQKPGKAPKRLIYATFDLASGVPSRFSGSGSGTDYTLTISSLQPEDFATYYCRQVGSYPETFGQGTKLEIKRGGSGGGGSGDIQMTQSPSSLSASVGDRVTITCRASQDIENYLNWYQQKPGKAPKLLIYYTSRLQSGVPSRFSGSGSGTDFTLTISSLQPEDFATYFCQQGNTQPPTFGQGTKLEIKR

SEQ ID NO: 766 - protein, 108 aa, Artificial Sequence; identical to SEQ ID NO: 31
  source: /note="Description of Artificial Sequence: Synthetic polypeptide"

SEQ ID NO: 767 - protein, 9 aa, Artificial Sequence
  source: /note="Description of Artificial Sequence: Synthetic peptide"
GGSGGGGSG

SEQ ID NO: 768 - protein, 108 aa, Artificial Sequence; identical to SEQ ID NO: 726
  source: /note="Description of Artificial Sequence: Synthetic polypeptide"

SEQ ID NO: 769 - protein, 106 aa, Artificial Sequence; identical to SEQ ID NO: 549
  source: /note="Description of Artificial Sequence: Synthetic polypeptide"

SEQ ID NO: 770 - protein, 255 aa, Artificial Sequence; identical to SEQ ID NO: 660
  source: /note="Description of Artificial Sequence: Synthetic polypeptide"

SEQ ID NO: 771 - protein, 124 aa, Artificial Sequence; identical to SEQ ID NO: 88
  source: /note="Description of Artificial Sequence: Synthetic polypeptide"

SEQ ID NO: 772 - protein, 10 aa, Artificial Sequence
  source: /note="Description of Artificial Sequence: Synthetic peptide"
GGGGSGGGGS

SEQ ID NO: 773 - protein, 121 aa, Artificial Sequence; identical to SEQ ID NO: 30
  source: /note="Description of Artificial Sequence: Synthetic polypeptide"

SEQ ID NO: 774 - protein, 330 aa, Artificial Sequence
  source: /note="Description of Artificial Sequence: Synthetic polypeptide"
ASTKGPSVFPLAPSSKSTSGGTAALGCLVKDYFPEPVTVSWNSGALTSGVHTFPAVLQSSGLYSLSSVVTVPSSSLGTQTYICNVNHKPSNTKVDKKVEPKSCDKTHTCPPCPAPEAAGGPSVFLFPPKPKDQLMISRTPEVTCVVVDVSHEDPEVKFNWYVDGVEVHNAKTKPREEQYNSTYRVVSVLTVLHQDWLNGKEYKCKVSNKALPAPIEKTISKAKGQPREPQVYTLPPSREEMTKNQVSLTCLVKGFYPSDIAVEWESNGQPENNYKTTPPVLDSDGSFFLYSKLTVDKSRWQQGNVFSCSVLHEALHNHYTQKSLSLSPGK

SEQ ID NO: 775 - protein, 255 aa, Artificial Sequence; identical to SEQ ID NO: 660
  source: /note="Description of Artificial Sequence: Synthetic polypeptide"

SEQ ID NO: 776 - protein, 124 aa, Artificial Sequence; identical to SEQ ID NO: 88
  source: /note="Description of Artificial Sequence: Synthetic polypeptide"

SEQ ID NO: 777 - protein, 10 aa, Artificial Sequence
  source: /note="Description of Artificial Sequence: Synthetic peptide"
GGGGSGGGGS

SEQ ID NO: 778 - protein, 121 aa, Artificial Sequence; identical to SEQ ID NO: 30
  source: /note="Description of Artificial Sequence: Synthetic polypeptide"

SEQ ID NO: 779 - protein, 330 aa, Artificial Sequence
  source: /note="Description of Artificial Sequence: Synthetic polypeptide"
ASTKGPSVFPLAPSSKSTSGGTAALGCLVKDYFPEPVTVSWNSGALTSGVHTFPAVLQSSGLYSLSSVVTVPSSSLGTQTYICNVNHKPSNTKVDKKVEPKSCDKTHTCPPCPAPEAAGGPSVFLFPPKPKDTLYITREPEVTCVVVDVSHEDPEVKFNWYVDGVEVHNAKTKPREEQYNSTYRVVSVLTVLHQDWLNGKEYKCKVSNKALPAPIEKTISKAKGQPREPQVYTLPPSREEMTKNQVSLTCLVKGFYPSDIAVEWESNGQPENNYKTTPPVLDSDGSFFLYSKLTVDKSRWQQGNVFSCSVMHEALHNHYTQKSLSLSPGK

SEQ ID NO: 780 - protein, 255 aa, Artificial Sequence; identical to SEQ ID NO: 670
  source: /note="Description of Artificial Sequence: Synthetic polypeptide"

SEQ ID NO: 781 - protein, 124 aa, Artificial Sequence; identical to SEQ ID NO: 88
  source: /note="Description of Artificial Sequence: Synthetic polypeptide"

SEQ ID NO: 782 - protein, 10 aa, Artificial Sequence
  source: /note="Description of Artificial Sequence: Synthetic peptide"
GGGGSGGGGS

SEQ ID NO: 783 - protein, 121 aa, Artificial Sequence; identical to SEQ ID NO: 109
  source: /note="Description of Artificial Sequence: Synthetic polypeptide"

SEQ ID NO: 784 - protein, 330 aa, Artificial Sequence; identical to SEQ ID NO: 774
  source: /note="Description of Artificial Sequence: Synthetic polypeptide"

SEQ ID NO: 785 - protein, 255 aa, Artificial Sequence; identical to SEQ ID NO: 660
  source: /note="Description of Artificial Sequence: Synthetic polypeptide"

SEQ ID NO: 786 - protein, 124 aa, Artificial Sequence; identical to SEQ ID NO: 88
  source: /note="Description of Artificial Sequence: Synthetic polypeptide"

SEQ ID NO: 787 - protein, 10 aa, Artificial Sequence
  source: /note="Description of Artificial Sequence: Synthetic peptide"
GGGGSGGGGS

SEQ ID NO: 788 - protein, 121 aa, Artificial Sequence; identical to SEQ ID NO: 30
  source: /note="Description of Artificial Sequence: Synthetic polypeptide"

SEQ ID NO: 789 - protein, 330 aa, Artificial Sequence; identical to SEQ ID NO: 734
  source: /note="Description of Artificial Sequence: Synthetic polypeptide"

SEQ ID NO: 790 - protein, 255 aa, Artificial Sequence; identical to SEQ ID NO: 720
  source: /note="Description of Artificial Sequence: Synthetic polypeptide"

SEQ ID NO: 791 - protein, 124 aa, Artificial Sequence; identical to SEQ ID NO: 91
  source: /note="Description of Artificial Sequence: Synthetic polypeptide"

SEQ ID NO: 792 - protein, 10 aa, Artificial Sequence
  source: /note="Description of Artificial Sequence: Synthetic peptide"
GGGGSGGGGS

SEQ ID NO: 793 - protein, 121 aa, Artificial Sequence; identical to SEQ ID NO: 30
  source: /note="Description of Artificial Sequence: Synthetic polypeptide"

SEQ ID NO: 794 - protein, 330 aa, Artificial Sequence; identical to SEQ ID NO: 734
  source: /note="Description of Artificial Sequence: Synthetic polypeptide"

SEQ ID NO: 795 - protein, 248 aa, Artificial Sequence; identical to SEQ ID NO: 540
  source: /note="Description of Artificial Sequence: Synthetic polypeptide"

SEQ ID NO: 796 - protein, 117 aa, Artificial Sequence; identical to SEQ ID NO: 58
  source: /note="Description of Artificial Sequence: Synthetic polypeptide"

SEQ ID NO: 797 - protein, 10 aa, Artificial Sequence
  source: /note="Description of Artificial Sequence: Synthetic peptide"
GGGGSGGGGS

SEQ ID NO: 798 - protein, 121 aa, Artificial Sequence; identical to SEQ ID NO: 30
  source: /note="Description of Artificial Sequence: Synthetic polypeptide"

SEQ ID NO: 799 - protein, 330 aa, Artificial Sequence; identical to SEQ ID NO: 734
  source: /note="Description of Artificial Sequence: Synthetic polypeptide"

SEQ ID NO: 800 - protein, 248 aa, Artificial Sequence; identical to SEQ ID NO: 550
  source: /note="Description of Artificial Sequence: Synthetic polypeptide"

SEQ ID NO: 801 - protein, 117 aa, Artificial Sequence; identical to SEQ ID NO: 59
  source: /note="Description of Artificial Sequence: Synthetic polypeptide"

SEQ ID NO: 802 - protein, 10 aa, Artificial Sequence
  source: /note="Description of Artificial Sequence: Synthetic peptide"
GGGGSGGGGS

SEQ ID NO: 803 - protein, 121 aa, Artificial Sequence; identical to SEQ ID NO: 30
  source: /note="Description of Artificial Sequence: Synthetic polypeptide"

SEQ ID NO: 804 - protein, 330 aa, Artificial Sequence; identical to SEQ ID NO: 734
  source: /note="Description of Artificial Sequence: Synthetic polypeptide"

SEQ ID NO: 805 - protein, 120 aa, Artificial Sequence; identical to SEQ ID NO: 37
  source: /note="Description of Artificial Sequence: Synthetic polypeptide"
  VARIANT (18)..(18): /replace="Val"
  misc_feature (18)..(18): /note="Residue given in the sequence has no preference with respect to the annotation for said position"
  VARIANT (30)..(30): /replace="Asn" or "Thr" or "Gly" or "Ala"
  VARIANT (31)..(31): /replace="Trp" or "Tyr" or "Ile" or "Asn" or "Phe" or "Arg" or "Leu"
  misc_feature (30)..(31): /note="Residues given in the sequence have no preference with respect to those in the annotations for said positions"
  VARIANT (33)..(33): /replace="Thr" or "Ser" or "Pro" or "Gly"
  VARIANT (34)..(34): /replace="Thr" or "Val"
  VARIANT (35)..(35): /replace="Thr"
  misc_feature (33)..(35): /note="Residues given in the sequence have no preference with respect to those in the annotations for said positions"
  VARIANT (50)..(50): /replace="Trp"
  VARIANT (51)..(51): /replace="Thr" or "Met" or "Leu" or "Val" or "Asn"
  misc_feature (50)..(51): /note="Residues given in the sequence have no preference with respect to those in the annotations for said positions"
  VARIANT (55)..(55): /replace="Phe" or "Thr" or "Ile"
  VARIANT (56)..(56): /replace="Arg" or "Asp"
  VARIANT (57)..(57): /replace="Ser" or "Ala" or "Asn" or "Pro" or "Ile" or "Val" or "Lys" or "Phe"
  VARIANT (58)..(58): /replace="Pro" or "Ser" or "Gly"
  VARIANT (59)..(59): /replace="Ile" or "Thr" or "Ser" or "Val" or "His" or "Ala" or "Arg" or "Met" or "Leu"
  misc_feature (55)..(59): /note="Residues given in the sequence have no preference with respect to those in the annotations for said positions"
  VARIANT (65)..(65): /replace="Gln"
  misc_feature (65)..(65): /note="Residue given in the sequence has no preference with respect to the annotation for said position"
  VARIANT (79)..(79): /replace="Ala"
  misc_feature (79)..(79): /note="Residue given in the sequence has no preference with respect to the annotation for said position"
  VARIANT (99)..(99): /replace="Ser" or "Trp" or "Thr" or "Ala"
  VARIANT (100)..(100): /replace="Val" or "Ile" or "Phe" or "Arg" or "Gln"
  VARIANT (101)..(101): /replace="Phe" or "Val" or "Pro" or "His"
  VARIANT (102)..(102): /replace="Phe" or "Val"
  VARIANT (103)..(103): /replace="Asn" or "Glu" or "Thr" or "Ile" or "Ala"
  VARIANT (104)..(104): /replace="Thr" or "Phe" or "Arg" or "Gly" or "Asp"
  VARIANT (105)..(105): /replace="Ser" or "Ala" or "Lys" or "Arg" or "Ile" or "Tyr" or "Val" or "Pro" or "Asn" or "Gly"
  VARIANT (106)..(106): /replace="Trp" or "Ser" or "Pro" or "Ala"
  VARIANT (107)..(107): /replace="Phe" or "Met"
  misc_feature (99)..(107): /note="Residues given in the sequence have no preference with respect to those in the annotations for said positions"

SEQ ID NO: 806 - protein, 108 aa, Artificial Sequence; identical to SEQ ID NO: 43
  source: /note="Description of Artificial Sequence: Synthetic polypeptide"
  VARIANT (1)..(1): /replace="Glu"
  misc_feature (1)..(1): /note="Residue given in the sequence has no preference with respect to the annotation for said position"
  VARIANT (4)..(4): /replace="Leu"
  misc_feature (4)..(4): /note="Residue given in the sequence has no preference with respect to the annotation for said position"
  VARIANT (11)..(11): /replace="Gln"
  misc_feature (11)..(11): /note="Residue given in the sequence has no preference with respect to the annotation for said position"
  VARIANT (28)..(28): /replace="Arg" or "Thr" or "Asn" or "Ile" or "Cys" or "Gly" or "Lys" or "Tyr" or "Trp"
  misc_feature (28)..(28): /note="Residue given in the sequence has no preference with respect to those in the annotations for said position"
  VARIANT (31)..(31): /replace="Arg" or "Thr" or "Gly" or "Asn" or "Lys" or "Cys" or "His" or "Val" or "Pro" or "Leu"
  VARIANT (32)..(32): /replace="Arg" or "Thr" or "Asn" or "Cys" or "Gly" or "Ile" or "Lys" or "Met" or "Leu" or "Tyr" or "Pro" or "Val"
  misc_feature (31)..(32): /note="Residues given in the sequence have no preference with respect to those in the annotations for said positions"
  VARIANT (49)..(49): /replace="Lys"
  VARIANT (50)..(50): /replace="Tyr"
  VARIANT (51)..(51): /replace="Val" or "Pro" or "Thr" or "Gly" or "Ser" or "Glu" or "Asp"
  misc_feature (49)..(51): /note="Residues given in the sequence have no preference with respect to those in the annotations for said positions"
  VARIANT (55)..(55): /replace="Leu" or "Val" or "Thr" or "Ser" or "Met" or "Asn" or "Lys" or "Phe" or "Arg"
  misc_feature (55)..(55): /note="Residue given in the sequence has no preference with respect to those in the annotations for said position"
  VARIANT (76)..(76): /replace="Asn"
  misc_feature (76)..(76): /note="Residue given in the sequence has no preference with respect to the annotation for said position"
  VARIANT (91)..(91): /replace="Arg" or "Asn" or "Gly" or "Thr" or "Cys" or "Ile"
  VARIANT (92)..(92): /replace="Arg" or "Gly" or "Ile" or "Cys" or "Asn" or "Thr" or "Met"
  VARIANT (93)..(93): /replace="Arg" or "Ile" or "Cys" or "Gly" or "Asn" or "Thr" or "Lys"
  VARIANT (94)..(94): /replace="Leu"
  misc_feature (91)..(94): /note="Residues given in the sequence have no preference with respect to those in the annotations for said positions"
  VARIANT (96)..(96): /replace="Leu" or "Ala" or "Ser" or "Arg" or "Thr" or "Gln" or "His"
  VARIANT (97)..(97): /replace="Ser" or "Arg" or "Leu" or "Thr" or "Ala" or "Gln" or "His" or "Val" or "Met"
  misc_feature (96)..(97): /note="Residues given in the sequence have no preference with respect to those in the annotations for said positions"
  VARIANT (104)..(104): /replace="Lys"
  misc_feature (104)..(104): /note="Residue given in the sequence has no preference with respect to the annotation for said position"

SEQ ID NO: 807 - protein, 117 aa, Artificial Sequence
  source: /note="Description of Artificial Sequence: Synthetic polypeptide"
  VARIANT (31)..(31): /replace="Asn" or "His" or "Tyr" or "Ile"
  VARIANT (32)..(32): /replace="Phe" or "Leu" or "Ser" or "Arg"
  VARIANT (33)..(33): /replace="Ser" or "Asn"
  misc_feature (31)..(33): /note="Residues given in the sequence have no preference with respect to those in the annotations for said positions"
  VARIANT (35)..(35): /replace="Thr" or "Ser" or "His" or "Gln" or "Tyr"
  misc_feature (35)..(35): /note="Residue given in the sequence has no preference with respect to those in the annotations for said position"
  VARIANT (50)..(50): /replace="Ile" or "Val" or "Leu" or "Arg" or "Lys" or "Ser"
  misc_feature (50)..(50): /note="Residue given in the sequence has no preference with respect to those in the annotations for said position"
  VARIANT (52)..(52): /replace="Arg" or "Gly" or "Ser" or "Ala" or "Leu"
  VARIANT (53)..(53): /replace="Ala" or "Ser" or "Asp" or "Glu" or "Val" or "Asn"
  VARIANT (54)..(54): /replace="Gly" or "Glu" or "Ala" or "Val" or "Gly" or "Tyr"
  misc_feature (52)..(54): /note="Residues given in the sequence have no preference with respect to those in the annotations for said positions"
  VARIANT (56)..(56): /replace="Thr" or "Phe" or "Ala" or "Tyr" or "Trp"
  misc_feature (56)..(56): /note="Residue given in the sequence has no preference with respect to those in the annotations for said position"
  VARIANT (58)..(58): /replace="Ala" or "His" or "Val" or "Ser" or "Asn" or "Gly"
  misc_feature (58)..(58): /note="Residue given in the sequence has no preference with respect to those in the annotations for said position"
  VARIANT (60)..(60): /replace="Ala"
  VARIANT (61)..(61): /replace="Asp"
  VARIANT (62)..(62): /replace="Ser"
  VARIANT (63)..(63): /replace="Val"
  misc_feature (60)..(63): /note="Residues given in the sequence have no preference with respect to those in the annotations for said positions"
  VARIANT (65)..(65): /replace="Gly"
  misc_feature (65)..(65): /note="Residue given in the sequence has no preference with respect to the annotation for said position"
  VARIANT (98)..(98): /replace="His" or "Gln" or "Leu" or "Tyr" or "Asp" or "Asn" or "Thr" or "Pro" or "Ala" or "Ser" or "Arg"
  VARIANT (99)..(99): /replace="Ser" or "Leu" or "Cys" or "Arg" or "Phe" or "Asp" or "Tyr" or "Pro" or "Ile" or "Gly"
  VARIANT (100)..(100): /replace="Gln" or "Arg" or "Leu" or "Tyr" or "Pro" or "Ala" or "Val" or "Asp" or "Cys"
  VARIANT (101)..(101): /replace="Gln" or "Pro" or "Leu" or "Asn" or "Tyr" or "Arg" or "Thr" or "Asp" or "Ala" or "Cys"
  VARIANT (102)..(102): /replace="Arg" or "Ala" or "Val" or "Trp" or "Glu" or "Ser" or "Pro" or "Ile"
  VARIANT (103)..(103): /replace="Thr" or "Ser" or "Gln" or "Ala" or "Lys"
  VARIANT (104)..(104): /replace="Leu" or "Gly" or "Asp" or "Glu" or "Trp" or "Arg" or "Pro" or "Ala" or "Ile"
  VARIANT (105)..(105): /replace="Asp" or "Val" or "Gly" or "Thr"
  VARIANT (106)..(106): /replace="Ser" or "Phe" or "Cys" or "Asn" or "Pro" or "Ile" or "His"
  misc_feature (98)..(106): /note="Residues given in the sequence have no preference with respect to those in the annotations for said positions"
EVQLVESGGGLVQPGGSLRLSCAASGFTFSDYGVNWVRQAPGKGLEWVSMIWGDGSTDYDSTLKSRFTISRDNSKNTLYLQMNSLRAEDTAVYYCAREWHHGPVAYWGQGTLVTVSS

SEQ ID NO: 808 - protein, 107 aa, Artificial Sequence
  source: /note="Description of Artificial Sequence: Synthetic polypeptide"
  VARIANT (24)..(24): /replace="Arg"
  misc_feature (24)..(24): /note="Residue given in the sequence has no preference with respect to the annotation for said position"
  VARIANT (28)..(28): /replace="Ser" or "Val" or "Gly" or "Asp" or "Thr" or "Pro"
  misc_feature (28)..(28): /note="Residue given in the sequence has no preference with respect to those in the annotations for said position"
  VARIANT (30)..(30): /replace="Arg" or "Thr" or "Ile" or "Asn" or "Cys" or "Lys"
  VARIANT (31)..(31): /replace="Arg" or "Asn" or "Gly" or "Cys" or "Thr" or "Ile"
  VARIANT (32)..(32): /replace="Pro" or "Thr" or "Gly" or "Val" or "Ser" or "Arg"
  VARIANT (33)..(33): /replace="Leu"
  misc_feature (30)..(33): /note="Residues given in the sequence have no preference with respect to those in the annotations for said positions"
  VARIANT (50)..(50): /replace="Ser" or "Arg" or "Leu" or "Cys" or "Gln" or "Gly"
  misc_feature (50)..(50): /note="Residue given in the sequence has no preference with respect to those in the annotations for said position"
  VARIANT (53)..(53): /replace="Ser" or "Ile" or "Leu" or "Lys" or "Ala" or "Arg"
  VARIANT (54)..(54): /replace="Leu"
  VARIANT (55)..(55): /replace="Gln" or "Thr" or "Ala" or "Glu" or "Phe"
  VARIANT (56)..(56): /replace="Ser"
  misc_feature (53)..(56): /note="Residues given in the sequence have no preference with respect to those in the annotations for said positions"
  VARIANT (91)..(91): /replace="Ser"
  VARIANT (92)..(92): /replace="Asn" or "Phe" or "Asp" or "Gly" or "His"
  VARIANT (93)..(93): /replace="Arg" or "Gly" or "Thr" or "Ile" or "Cys"
  VARIANT (94)..(94): /replace="Ser" or "Pro" or "Met" or "Ile" or "Ala"
  VARIANT (95)..(95): /replace="Thr" or "Arg" or "Leu" or "Gln" or "Ala" or "Ser"
  VARIANT (96)..(96): /replace="Tyr"
  misc_feature (91)..(96): /note="Residues given in the sequence have no preference with respect to those in the annotations for said positions"
DIQMTQSPSSLSASVGDRVTITCKASQAVSSAVAWYQQKPGKAPKLLIYWASTRHTGVPSRFSGSGSGTDFTLTISSLQPEDFATYYCQQHYSTPFTFGQGTKLEIK

SEQ ID NO: 809 - protein, 124 aa, Artificial Sequence
  source: /note="Description of Artificial Sequence: Synthetic polypeptide"
  VARIANT (2)..(2): /replace="Val"
  misc_feature (2)..(2): /note="Residue given in the sequence has no preference with respect to the annotation for said position"
  VARIANT (30)..(30): /replace="Asn" or "Ala" or "Ser" or "Arg" or "Asp" or "Lys" or "Pro" or "Gln" or "Met" or "Gly" or "Glu"
  VARIANT (31)..(31): /replace="Asp" or "His" or "Thr" or "Ser" or "Gln" or "Lys"
  misc_feature (30)..(31): /note="Residues given in the sequence have no preference with respect to those in the annotations for said positions"
  VARIANT (34)..(34): /replace="Ile"
  VARIANT (35)..(35): /replace="Ile" or "Thr" or "Gln" or "Ser" or "Gly" or "Ala" or "Val"
  misc_feature (34)..(35): /note="Residues given in the sequence have no preference with respect to those in the annotations for said positions"
  VARIANT (55)..(55): /replace="Asn" or "Ser"
  misc_feature (55)..(55): /note="Residue given in the sequence has no preference with respect to those in the annotations for said position"
  VARIANT (57)..(57): /replace="Lys" or "Val" or "Gln" or "Arg" or "Leu" or "Ser" or "Asn" or "Ile" or "Asp" or "Ala"
  misc_feature (57)..(57): /note="Residue given in the sequence has no preference with respect to those in the annotations for said position"
  VARIANT (59)..(59): /replace="Ser" or "His" or "Asn" or "Met" or "Lys" or "Ala" or "Arg" or "Gln" or "Asp"
  misc_feature (59)..(59): /note="Residue given in the sequence has no preference with respect to those in the annotations for said position"
  VARIANT (62)..(62): /replace="Gln"
  VARIANT (63)..(63): /replace="Gly" or "Lys"
  VARIANT (64)..(64): /replace="Leu"
  VARIANT (65)..(65): /replace="Thr" or "Gln"
  misc_feature (62)..(65): /note="Residues given in the sequence have no preference with respect to those in the annotations for said positions"
  VARIANT (68)..(68): /replace="Val"
  misc_feature (68)..(68): /note="Residue given in the sequence has no preference with respect to the annotation for said position"
  VARIANT (70)..(70): /replace="Met"
  misc_feature (70)..(70): /note="Residue given in the sequence has no preference with respect to the annotation for said position"
  VARIANT (72)..(72): /replace="Thr"
  misc_feature (72)..(72): /note="Residue given in the sequence has no preference with respect to the annotation for said position"
  VARIANT (95)..(95): /replace="Tyr"
  misc_feature (95)..(95): /note="Residue given in the sequence has no preference with respect to the annotation for said position"
  VARIANT (99)..(99): /replace="Arg" or "Asn"
  VARIANT (100)..(100): /replace="Leu" or "Tyr" or "Ile" or "Val" or "Cys"
  VARIANT (101)..(101): /replace="Phe" or "Met" or "Arg" or "Ser" or "Trp" or "Gln" or "Val" or "Asn" or "Gly" or "Cys"
  VARIANT (102)..(102): /replace="Asn" or "Lys" or "Ser" or "Arg" or "Leu" or "Pro" or "Phe" or "Asp" or "Met" or "Ala"
  VARIANT (103)..(103): /replace="Pro" or "Val" or "Ser" or "Ala"
  VARIANT (104)..(104): /replace="Met" or "Glu" or "Ala" or "Arg" or "Ile" or "Gln" or "Gly" or "Asp"
  VARIANT (105)..(105): /replace="Asp" or "Ala" or "Glu" or "Ser" or "Met" or "Ile" or "Pro"
  VARIANT (106)..(106): /replace="Ala" or "Glu" or "Met" or "Asp" or "Gly" or "Ile" or "Gln" or "Pro" or "Asn" or "Leu" or "His"
  VARIANT (107)..(107): /replace="Ser" or "Met" or "Asn"
  VARIANT (108)..(108): /replace="Glu"
  VARIANT (109)..(109): /replace="Asn" or "Ser" or "Cys" or "His" or "Asp" or "Ile" or "Phe" or "Val" or "Leu" or "Ala"
  VARIANT (110)..(110): /replace="Thr" or "Arg" or "Cys"
  misc_feature (99)..(110): /note="Residues given in the sequence have no preference with respect to those in the annotations for said positions"
EIQLVQSGAEVKKPGASVKVSCKASGYTFTNYGMNWVRQAPGQGLEWMGWINTYTGEPTYADDFKGRFTFTLDTSTSTAYMELSSLRSEDTAVYFCARKFLTTVVVTDYAMDYWGQGTTVTVSS

SEQ ID NO: 810 - protein, 107 aa, Artificial Sequence
  source: /note="Description of Artificial Sequence: Synthetic polypeptide"
  VARIANT (28)..(28): /replace="Asn" or "Glu" or "His" or "Gly" or "Val" or "Arg" or "Ala"
  misc_feature (28)..(28): /note="Residue given in the sequence has no preference with respect to those in the annotations for said position"
  VARIANT (30)..(30): /replace="Tyr" or "Glu" or "Ala" or "Thr" or "Trp" or "Gly" or "Asn" or "Phe" or "Cys"
  VARIANT (31)..(31): /replace="Gln" or "Ser" or "Lys" or "Thr" or "His" or "Asp" or "Arg"
  VARIANT (32)..(32): /replace="Val" or "Phe" or "Thr"
  misc_feature (30)..(32): /note="Residues given in the sequence have no preference with respect to those in the annotations for said positions"
  VARIANT (43)..(43): /replace="Ala" or "Val"
  VARIANT (44)..(44): /replace="Pro"
  misc_feature (43)..(44): /note="Residues given in the sequence have no preference with respect to those in the annotations for said positions"
  VARIANT (50)..(50): /replace="Phe" or "Asn"
  VARIANT (51)..(51): /replace="Ala"
  misc_feature (50)..(51): /note="Residues given in the sequence have no preference with respect to those in the annotations for said positions"
  VARIANT (53)..(53): /replace="Leu" or "Lys" or "Gly"
  misc_feature (53)..(53): /note="Residue given in the sequence has no preference with respect to those in the annotations for said position"
  VARIANT (71)..(71): /replace="Phe"
  misc_feature (71)..(71): /note="Residue given in the sequence has no preference with respect to the annotation for said position"
  VARIANT (87)..(87): /replace="Tyr"
  misc_feature (87)..(87): /note="Residue given in the sequence has no preference with respect to the annotation for said position"
  VARIANT (92)..(92): /replace="Ile"
  VARIANT (93)..(93): /replace="Ser" or "Met" or "Ile" or "Ala" or "Arg"
  VARIANT (94)..(94): /replace="Trp" or "Gln" or "Pro" or "Met" or "Arg" or "Phe" or "Gly" or "Val" or "Tyr" or "Ala"
  misc_feature (92)..(94): /note="Residues given in the sequence have no preference with respect to those in the annotations for said positions"
  VARIANT (96)..(96): /replace="Thr" or "Ser" or "Ala"
  misc_feature (96)..(96): /note="Residue given in the sequence has no preference with respect to those in the annotations for said position"
DIQMTQSPSSLSASVGDRVTITCRASQDISNYLNWYQQKPGKTVKLLIYYTSRLQSGVPSRFSGSGSGTDYTLTISSLQPEDFATYFCQQGNTLPPTFGQGTKLEIK

SEQ ID NO: 811 - protein, 121 aa, Artificial Sequence; identical to SEQ ID NO: 108
  source: /note="Description of Artificial Sequence: Synthetic polypeptide"
  VARIANT (30)..(30): /replace="Asp" or "Ser" or "Ala" or "Glu" or "Asn" or "Pro"
  VARIANT (31)..(31): /replace="Glu"
  misc_feature (30)..(31): /note="Residues given in the sequence have no preference with respect to those in the annotations for said positions"
  VARIANT (48)..(48): /replace="Met"
  misc_feature (48)..(48): /note="Residue given in the sequence has no preference with respect to the annotation for said position"
  VARIANT (51)..(51): /replace="Ile"
  misc_feature (51)..(51): /note="Residue given in the sequence has no preference with respect to the annotation for said position"
  VARIANT (54)..(54): /replace="Asp"
  misc_feature (54)..(54): /note="Residue given in the sequence has no preference with respect to the annotation for said position"
  VARIANT (58)..(58): /replace="Ser" or "Ile"
  VARIANT (59)..(59): /replace="Leu" or "Tyr" or "Met"
  misc_feature (58)..(59): /note="Residues given in the sequence have no preference with respect to those in the annotations for said positions"
  VARIANT (68)..(68): /replace="Val" or "Ile"
  misc_feature (68)..(68): /note="Residue given in the sequence has no preference with respect to those in the annotations for said position"
  VARIANT (70)..(70): /replace="Ile"
  misc_feature (70)..(70): /note="Residue given in the sequence has no preference with respect to the annotation for said position"
  VARIANT (100)..(100): /replace="Asp" or "Ser" or "Trp" or "Phe" or "Glu" or "Asn"
  VARIANT (101)..(101): /replace="Lys" or "Met"
  VARIANT (102)..(102): /replace="Trp" or "Phe"
  VARIANT (103)..(103): /replace="Asp" or "Trp" or "Tyr" or "Val" or "Asn" or "Met" or "Phe"
  VARIANT (104)..(104): /replace="Gly"
  VARIANT (105)..(105): /replace="Leu" or "Tyr" or "Ser"
  VARIANT (106)..(106): /replace="Glu" or "Asn" or "Asp" or "Leu" or "Ser" or "Gln" or "Ala" or "Arg" or "Phe" or "Met" or "Lys" or "His"
  misc_feature (100)..(106): /note="Residues given in the sequence have no preference with respect to those in the annotations for said positions"
  VARIANT (110)..(110): /replace="Ile" or "Cys" or "Glu" or "Leu" or "Ser" or "Phe" or "His" or "Ala"
  misc_feature (110)..(110): /note="Residue given in the sequence has no preference with respect to the annotation for said position"

SEQ ID NO: 812 - protein, 107 aa, Artificial Sequence
  source: /note="Description of Artificial Sequence: Synthetic polypeptide"
  VARIANT (4)..(4): /replace="Met"
  misc_feature (4)..(4): /note="Residue given in the sequence has no preference with respect to the annotation for said position"
  VARIANT (24)..(24): /replace="Arg" or "Lys"
  misc_feature (24)..(24): /note="Residue given in the sequence has no preference with respect to those in the annotations for said position"
  VARIANT (27)..(27): /replace="Gln"
  VARIANT (28)..(28): /replace=" " or "Ser" or "Asp" or "Gln" or "Ala" or "Ile" or "Val" or "Thr" or "Glu"
  VARIANT (29)..(29): /replace="Ile" or "Val" or "Leu"
  VARIANT (30)..(30): /replace="Arg" or "Ser" or "Val" or "Asn" or "Phe" or "Gly" or "Leu" or "Pro" or "Lys" or "Met"
  VARIANT (31)..(31): /replace="Arg" or "Asn" or "Gly" or "Thr" or "Pro" or "Leu" or "Asp" or "Cys"
  VARIANT (32)..(32): /replace="Cys" or "Ser" or "Asp" or "Asn" or "Pro" or "Ile" or "Phe" or "Ala"
  VARIANT (33)..(33): /replace="Leu" or "Val"
  VARIANT (34)..(34): /replace="Asp" or "Asn" or "Phe" or "Ser" or "Gln" or "Gly"
  misc_feature (27)..(34): /note="Residues given in the sequence have no preference with respect to those in the annotations for said positions"
  VARIANT (36)..(36): /replace="Tyr"
  misc_feature (36)..(36): /note="Residue given in the sequence has no preference with respect to the annotation for said position"
  VARIANT (43)..(43): /replace="Ala"
  misc_feature (43)..(43): /note="Residue given in the sequence has no preference with respect to the annotation for said position"
  VARIANT (47)..(47): /replace="Leu"
  misc_feature (47)..(47): /note="Residue given in the sequence has no preference with respect to the annotation for said position"
  VARIANT (50)..(50): /replace="Arg" or "Glu" or "Asp" or "Ser" or "Gly" or "Thr" or "Gln" or "Pro" or "Met"
  misc_feature (50)..(50): /note="Residue given in the sequence has no preference with respect to those in the annotations for said position"
  VARIANT (52)..(52): /replace="Ser"
  VARIANT (53)..(53): /replace="Asp" or "Ala" or "Tyr" or "Gly" or "Gln" or "Trp" or "Leu" or "His"
  misc_feature (52)..(53): /note="Residues given in the sequence have no preference with respect to those in the annotations for said positions"
  VARIANT (55)..(55): /replace="Gln"
  misc_feature (55)..(55): /note="Residue given in the sequence has no preference with respect to the annotation for said position"
  VARIANT (89)..(89): /replace="Arg" or "Gln" or "Leu" or "Asn" or "Tyr" or "Ser" or "Val" or "Ala"
  misc_feature (89)..(89): /note="Residue given in the sequence has no preference with respect to those in the annotations for said position"
  VARIANT (91)..(91): /replace="Val" or "Trp" or "Leu" or "Met" or "Lys" or "Phe" or "Pro" or "Gly" or "Ser" or "Gln" or "Ile" or "Thr" or "Asp"
  VARIANT (92)..(92): /replace="Gly" or "Thr" or "Met" or "Asn" or "Arg" or "Lys" or "Ala" or "Asp"
  VARIANT (93)..(93): /replace="Asn" or "Ile" or "Arg" or "Phe" or "Thr" or "Tyr" or "Leu" or "Met" or "Trp" or "Lys" or "His" or "Gly"
  misc_feature (91)..(93): /note="Residues given in the sequence have no preference with respect to those in the annotations for said positions"
  VARIANT (96)..(96): /replace="Glu" or "Leu" or "Gly" or "Phe" or "Tyr" or "Pro" or "Ile" or "Asp" or "Arg" or "His" or "Gln" or "Asn" or "Cys"
  misc_feature (96)..(96): /note="Residue given in the sequence has no preference with respect to those in the annotations for said position"
DIQLTQSPSSLSASVGDRVTITCSASSGSISYIYWFQQKPGKSPKRWIYATFELASGVPSRFSGSGSGTDYTLTISSLQPEDFATYYCHQRSSYPWTFGQGTKLEIK
